(19) United States
(12) Patent Application Publication
(10) Pub. No.: US 2025/0092353 A1
(43) Pub. Date: Mar. 20, 2025

(54) COMMENSAL FUNGUS AND USES THEREOF

(71) Applicant: YEDA RESEARCH AND DEVELOPMENT CO. LTD., Rehovot (IL)

(72) Inventors: Steffen JUNG, Rehovot (IL); Jarmila Sekeresova KRALOVA, Rehovot (IL)

(21) Appl. No.: 18/942,735

(22) Filed: Nov. 10, 2024

Related U.S. Application Data
(63) Continuation of application No. PCT/IL2023/050470, filed on May 9, 2023.
(60) Provisional application No. 63/339,570, filed on May 9, 2022.
(60) Provisional application No. 63/450,024, filed on Mar. 5, 2023.

(51) Int. Cl. C12N 1/16; A01K 67/027; A61K 36/064; A61P 31/10; C12R 1/645

(52) U.S. Cl. CPC C12N 1/165; A01K 67/027; A61K 36/064; A61P 31/10; A01K 2207/12; A01K 2227/105; C12R 2001/645

(57) ABSTRACT

There is provided an isolated fungus belonging to the genus Kazachstania, a composition comprising same, and methods of using same, such as for preventing or treating an infection, a disease, or both.

### REFERENCE TO AN ELECTRONIC SEQUENCE LISTING

[0001] The contents of the electronic sequence listing (YEDA-P-012-US ST26 XML.xml; size: 8,982,534 bytes; and date of creation: Dec. 6, 2024) is herein incorporated by reference in its entirety.

### CROSS-REFERENCE TO RELATED APPLICATION

[0002] This application claims the benefit of priority of U.S. Provisional Patent Application No. 63/339,570, filed May 9, 2022, and of U.S. Provisional Patent Application No. 63/450,024 both titled “COMMENSAL FUNGUS AND USES THEREOF”, filed Mar. 5, 2023, all of which are hereby incorporated by reference in their entirety.

### FIELD OF INVENTION

[0003] The present invention relates to inter alia an isolated fungus, composition comprising same, and a method of using same, such as for preventing or treating a disease, an infection, or both.

### BACKGROUND

[0004] The genetic information that defines human beings includes the genomes of the human cells but also of the commensal microbiome. While the analysis of this metagenome has focused mainly on the abundant bacterial commensals, mucosal surfaces are also inhabited by fungi. However, the role of the mycobiota and their contributions to host fitness are less well understood. This is partially due to the underrepresentation of fungi in the microbiome of animal models that are kept under strict hygienic conditions.

[0005] As one of the most common human fungal pathogens, Candida albicans causes hundreds of millions of symptomatic infections each year. Pathologies are frequently associated with immuno-deficiencies and range from superficial irritations of the skin and mucosae to life-threatening invasive infections of internal organs. In addition, inborn errors of IL-17 immunity are strongly linked to chronic mucocutaneous candidiasis (CMC). Fungal dissemination, leading to systemic infection, is believed to originate from the gut, where C. albicans normally reside as a harmless commensal. Candidiasis has been linked to filamentation of the fungus, which is strictly associated with the expression of the cytolytic peptide toxin candidalysin that promotes barrier damage. Human individuals are colonized in childhood, and clonal fungal populations persist over their lifetime, mostly without any symptoms. Emerging evidence suggests that fungal colonization in fact rather benefits, than harms the host and that the gut mycobiota contributes to improving mammalian immunity. Commensal fungi, specifically C. albicans, were shown to affect the composition of the myeloid innate immune compartment and elicit cellular and humoral immunity. Insights into the diverse interactions of fungi with the mammalian hosts and other fungi, but also communication with bacterial commensals, could significantly aid the understanding of host physiology. Moreover, a better understanding might allow harnessing the impact of commensal fungi on human immunity for therapeutic purposes. The host-fungi interface remains, however, incompletely understood, not the least due to the lack of suitable experimental animal models and our limited insight into fungal commensalism.

[0006] The dominant human fungal commensal, C. albicans, has also been reported as part of the mycobiota of wild mice. However, animals kept under special pathogen-free (SPF) conditions mostly lack C. albicans and generally harbor poorly developed mycobiota that also differ considerably between vendors. Laboratory mice generally even resist C. albicans colonization unless subjected to antibiotics (Abx), which are believed to be required to neutralize inhibiting bacteria, including Lactobacillae.

[0007] There is still a great need for effective and safe treatment for C. albicans infections, such as by utilizing commensal fungi.

### SUMMARY

[0008] The present invention, in some embodiments, is based, at least in part, on the serendipitous identification of a novel fungal commensal of the Kazachstania genus that efficiently colonizes laboratory animals kept in SPF facilities without prior Abx conditioning. The isolated commensal fungus, disclosed herein, is termed K. weizmannii, and was shown to outcompete C. albicans during competitive seeding and even expelled C. albicans from stably colonized animals. Further, the current invention, in some embodiments, is based, at least in part, on the finding that unlike C. albicans, the non-filamenting K. weizmannii fungus did not disseminate or cause pathology in immune-suppressed animals. In fact, the inventors showed that K. weizmannii posed an inter-fungal competition that reduced the intestinal C. albicans load of mice mitigated fatal candidiasis.

[0009] The present invention, in some embodiments, is further based, at least in part, on the findings that colonization of fungi of the Kazachstania clade was found in some individuals to show inverse correlation with C. albicans abundance in the gut.

[0010] Therefore, the isolated fungus disclosed herein is suggested as a robust competitive commensal to C. albicans, and a method for mitigating systemic fungal pathology, is devised therewith.

[0011] According to the first aspect, there is provided an isolated fungus belonging to the genus Kazachstania and deposited at the ATCC under the deposit number PTA-127318.

[0012] According to another aspect, there is provided a composition comprising the isolated fungus, and a pharmaceutically acceptable carrier.

[0013] According to another aspect, there is provided a composition comprising a fungus, wherein at least 90% of the fungus is the isolated fungus disclosed herein.

[0014] According to another aspect, there is provided a method for preventing or treating an autoimmune disease in a subject in need thereof, the method comprising administering to the subject a therapeutically effective amount of a pharmaceutical composition comprising the isolated fungus disclose herein, thereby preventing or treating an autoimmune disease in the subject.

[0015] According to another aspect, there is provided a method for preventing or treating a fungal infection in a subject in need thereof, the method comprising administering to the subject a therapeutically effective amount of a pharmaceutical composition comprising the isolated fungus disclosed herein.

[0016] According to another aspect, there is provided non-human animal subject comprising the isolated fungus disclosed herein.

[0017] According to another aspect, there is provided a method for producing the non-human animal subject disclosed herein, comprising colonizing a gastrointestinal tract of a non-human animal subject with an effective amount of any one of: (a) the isolated fungus disclosed herein; and (b) the composition disclosed herein, thereby producing the non-human animal subject.

[0018] In some embodiments, the composition is for use in the treatment or prevention of a disease in a subject in need thereof.

[0019] In some embodiments, the disease comprises an autoimmune disease, an infectious disease or both.

[0020] In some embodiments, the autoimmune disease is a T helper 17 cells (Th17)-driven immunopathology.

[0021] In some embodiments, the autoimmune disease is selected from the group consisting of: multiple sclerosis, psoriasis, and asthma.

[0022] In some embodiments, the infectious disease is a fungal infection.

[0023] In some embodiments, the fungal infection comprises a Candida infection.

[0024] In some embodiments, the fungal infection comprises a Candida albicans infection.

[0025] In some embodiments, the autoimmune disease is: (i) induced T helper 17 cells (Th17) activity; (ii) characterized by increased Th17 activity; or (iii) both (i) and (ii).

[0026] In some embodiments, the Th17 activity is induced by a fungal infection.

[0027] In some embodiments, the subject is afflicted with a fungal infection.

[0028] In some embodiments, the treating comprises reducing the number or abundance of a fungus inducing said fungal infection in the gastrointestinal tract of said subject.

[0029] In some embodiments, the reducing is: (i) by at least 30% compared to control; (ii) for at least 4 days; or (iii) both (i) and (ii).

[0030] In some embodiments, the treating comprises reducing the activity, abundance, or both, of Th 17 cells in the subject.

[0031] In some embodiments, the administering comprises colonizing the gut of the subject with the isolated fungus.

[0032] In some embodiments, the non-human animal subject is gnotobiotic.

[0033] In some embodiments, the non-human animal subject is a mouse.

[0034] In some embodiments, the isolated fungus disclosed herein colonizes or is present in the gastrointestinal tract of the non-human animal subject.

[0035] In some embodiments, the method further comprises rearing/culturing the non-human animal subject under pathogen free conditions.

[0036] Unless otherwise defined, all technical and/or scientific terms used herein have the same meaning as commonly understood by one of ordinary skill in the art to which the invention pertains. Although methods and materials similar or equivalent to those described herein can be used in the practice or testing of embodiments of the invention, exemplary methods and/or materials are described below. In case of conflict, the patent specification, including definitions, will control. In addition, the materials, methods, and examples are illustrative only and are not intended to be necessarily limiting.

[0037] Further embodiments and the full scope of applicability of the present invention will become apparent from the detailed description given hereinafter. However, it should be understood that the detailed description and specific examples, while indicating preferred embodiments of the invention, are given by way of illustration only, since various changes and modifications within the spirit and scope of the invention will become apparent to those skilled in the art from this detailed description.

### BRIEF DESCRIPTION OF THE DRAWINGS

[0038] The patent or application file contains at least one drawing executed in color. Copies of this patent or patent application publication with color drawing(s) will be provided by the Office upon request and payment of the necessary fee.

[0039] FIGS. 1A-1H include a scheme, graphs, fluorescent micrographs, and phylogenetic trees, showing the identification and characterization of K. weizmannii. (1A) Schematic non-limiting protocol of C. albicans colonization (adopted from Basu et al., 2000). (1B) Recoverable C. albicans in the feces of wt mice with Abx supplementation in the drinking water, 2 weeks after oral C. albicans inoculation. (1C) Recoverable fungi in feces of unexposed SPF mutant mice and C. albicans inoculated animals; stippled line, limit of detection. (1D) Recoverable C. albicans in the feces 2 weeks after oral inoculation—comparison of colonization between mutant and wt animals (1E) Flow cytometry and microscopical examination of fungal colonies recovered from mutant animals. (1F) Phylogenetic tree based on Maximum Parsimony of the 26S rDNA domains 1 and 2 (D1/D2) region of newly identified K. weizmannii in comparison to other yeast model species. (1G) Phylogenetic tree based on Maximum Parsimony of the 26S rDNA D1/D2 region of K. weizmannii in comparison to other Kazachstania species. (1H) Comparison of whole genome of newly identified K. weizmannii to whole genomes of Kazachstania species.

[0040] FIGS. 2A-2F include micrographs, graphs, a plot, and a curve showing in vitro culture characteristics of K. weizmannii. (2A) Representative images of C. albicans and K. weizmannii in liquid media in presence of filament-inducing conditions, n=3 independent experiments. (2B) A graph showing largest differences in growth between K. weizmannii and C. albicans with different carbon sources, based on a z-score > or <2. Differences were calculated using the normalized area under the curve (AUC) of K. weizmannii and C. albicans. Normalization of the AUC are based on the growth of both species with glucose. Size of data points corresponds to the normalized AUC of K. weizmannii with the corresponding carbon source. All measurements were done using the Biolog Phenotype MicroArrays in biological triplicates. X-axis represents the difference in AUC between K. weizmannii and C. albicans, while the x-axis shows the different carbon sources tested. The data points are color-coded according to the different types of carbon sources. (2C) A graph showing the largest differences in growth between K. weizmannii and C. albicans with different nitrogen sources, based on a z-score greater than or less than 2. Differences were calculated using AUC of K. weizmannii and C. albicans and normalized based on the growth of both species with glutamine. Size of data points corresponds to the normalized AUC of K. weizmannii with the corresponding carbon source. All measurements were performed using the Biolog Phenotype MicroArrays in biological triplicates. X-axis represents the difference in AUC between K. weizmannii and C. albicans, while the x-axis shows the different nitrogen sources tested. The data points are color-coded according to the different types of nitrogen sources. (2D) Plot of the largest differences in growth of K. weizmannii and C. albicans with different inhibitors to test their chemical sensitivity. Graph shows the largest differences in growth between K. weizmannii and C. albicans with different inhibitors, based on a z-score greater than or less than 2., calculated using AUC of K. weizmannii and C. albicans. AUC normalization was based on the growth of both species without any inhibitor at pH 5. The size of each data point corresponds to the AUC of K. weizmannii with the corresponding inhibitor. All measurements were done using the Biolog Phenotype MicroArrays for chemical sensitivity (PM21-PM25) in biological triplicates. (2E) Growth curves of C. albicans, S. cerevisiae and K. weizmannii under different Ph conditions in YPD medium; AUC, Area under curve, biological triplicates. (2F) Co-culture assay of C. albicans and K. weizmannii. GFP expressing C. albicans was detected by flowcytometry to discriminate between fungi, n=2 independent experiments.

[0041] FIGS. 3A-3M include fluorescent micrographs, graphs, and a scheme, showing K. weizmannii competition with C. albicans in colonized animals. (3A) A representative picture of a far-red fluorescent reporter Kazachstania strain (K. weizmannii ENO1-Mirf). (3B-C) Recoverable fecal K. weizmannii in colonized wild-type animals (without antibiotics) one and six months after single oral K. weizmannii ENO1-Mirf inoculation. (3D) Flow cytometric analysis of C. albicans SC5314 (ENO1-GFP), K. weizmannii (ENO1-Mirf), and mixed cultures used for oral inoculation (3E). (3E) Representative plating analysis of feces of animals inoculated with 107 yeasts of C. albicans SC5314 (ENO1-GFP) or K. weizmannii (ENO1-Mirf), and mixed cultures (see (3D)) 3 weeks after administration. (3F-3G) Flow cytometric analysis of feces of animals orally inoculated with 107 yeasts of C. albicans SC5314 (ENO1-GFP), K. weizmannii (ENO1-Mirf), and mixed cultures (see (D)) 3 weeks after administration. Quantification (n=3-5 mice per group, 4 independent experiments) (see (3D). (3H) Schematic non-limiting outline of a co-housing experiment. (3I) Representative flow cytometric feces analysis of colonized mice 4 weeks after initial colonization (before cohousing) and 2 weeks after co-housing. (N=4 per group). (3J) Percentages of respective labelled fungi in feces of C. albicans, K. weizmannii colonized animals, before and after co-housing in Abx presence (except for day 48 and 58); antibiotics withdrawal on day 46 of cohousing, n=4 per group, representative of 2 independent experiments. (3K) Flow cytometric analysis of feces of germfree animals 1 week after oral inoculation of single fungi cultures or mixed C. albicans SC5314 (ENO1-GFP)/K. weizmannii (ENO1-Mirf) culture. (3L) Percentages and (3M) amount of C. albicans and K. weizmannii recovered from feces of germ-free animals colonized with C. albicans SC5314 (C), K. weizmannii (K), or mixed culture (C/K) compared to Abx-treated SPF animals 1 week after administration as determined by flow cytometry analysis (3K); representative of 2 independent experiments.

[0042] FIGS. 4A-4F include graphs showing humoral and cellular immune responses to C. albicans and Kazachstania sp. (4A) Flow cytometric analysis of myeloid blood cell compartment of mice 4 weeks colonized with C. albicans or K. weizmannii. Neutrophils, classical and non-classical monocytes are defined as Ly6G+CD 115−, Ly6C+CD 115+, and Ly6C+CD 115+ cells, respectively. N=8-21 mice, pooled from 3 independent experiments. Gating strategy, left, results, right. (4B) Flow cytometric analysis of humoral anti-fungal reactivity. Gating strategy for the determination of serum immunoglobulin binding to cultured C. albicans or K. weizmannii. (4C) Anti-C. albicans and K. weizmannii IgA and IgG serum reactivity of single-colonized animals, measured as shown in (4B). Note that most but not all animals harbor cross-reactive sera. (4D) Representative gating strategy of RORγt+ T cells (left); percentage of RORγt+ cells among TCRβ CD4+ T cells 5 weeks upon C. albicans or K. weizmannii colonization, n=3-5 mice per group, 3 independent experiments (right). (4E) Representative gating strategy of RORγt+ T cells (left); percentage of RORγt+ cells among TCRβ CD4+ T cells 5 weeks upon C. albicans or K. weizmannii colonization, n=3-5 mice per group, 3 independent experiments (right). (4F) Epithelial cell (EC) coculture assay of C. albicans, S. cerevisiae, and K. weizmannii. EC damage was assessed using the LDH assay as described in (Allert et al., 2018).

[0043] FIGS. 5A-5I include a scheme, graphs, micrographs, and fluorescent micrographs, showing that commensal C. albicans but not K. weizmannii causes pathology in immunosuppressed animals. (5A) A non-limiting schematic outline of experimental set up for immunosuppression protocol. (5B) A weight curve of C. albicans-colonized mice and uncolonized controls upon cortisone 21-acetate injections, n=5 mice per group. (5C) Representative pictures of tongue candidiasis observed in C. albicans-colonized mice day 10 post immunosuppression. (5D) A representative picture of C. albicans-induced kidney pathology. (5E) A weight loss curve, comparison of C. albicans and K. weizmannii colonized mice, n=4-7 mice per group, 4 independent experiments, error bar represents SEM. (5F) Percent of initial weight in the endpoint of the experiment, graph represents mean with SD. (5G) Representative pictures of C. albicans and K. weizmannii recoverable by plating of feces (10 ng) and kidneys (10 mg) of C. albicans or K. weizmannii colonized animals (with Abx) 10 days after immunosuppression. (5H) Pathology score based on microscopic and macroscopic evaluation of kidneys, score scheme. (5I) Weight loss comparison between K. weizmannii- and non-colonized animals. n=5 per group.

[0044] FIGS. 6A-6F include a scheme, graphs, micrographs, and fluorescent micrographs showing that K. weizmannii mitigates C. albicans-induced pathology in immunosuppressed mice. (6A) Recovered C. albicans in feces (during continuous Abx treatment), and upon Abx withdrawal, as analyzed by flow cytometry and cultivation. (6B) A weigh monitoring curve following immunosuppression of C. albicans-colonized animals kept on Abx or withdrawn from Abx. (6C) Representative pictures of recoverable C. albicans and K. weizmannii from feces of C. albicans-colonized animals with or without K. weizmannii supplementation in their drinking water, analyzed by flow cytometry and cultivation. (6D) A weight monitoring curve (% initial weight), comparison of immunosuppressed animals following C. albicans-colonization and K. weizmannii-outcompeted C. albicans colonization. (6E) Representative pictures of kidneys (PAS staining) of immunosuppressed animals following C. albicans-colonization and K. weizmannii-outcompeted C. albicans colonization and results of cultivations of 1 mg kidney homogenate. (6F) A weight monitoring curve (% initial weight)—C. albicans and K. weizmannii-outcompeted animals, error bar SEM.

[0045] FIGS. 7A-7E include schemes, diagrams, and graphs showing the presence of Kazachstania in human metagenomes. (7A) Schematic of bioinformatic screening strategy of metagenomes. Briefly (from right to left), comparative genome analysis identified nucleotides regions that are unique to the genomes of either K. weizmannii or C. albicans species, together with genus-level regions of their ITS sequences. These regions were used to screen thousands of shotgun metagenomics collected and assembled by the Global Microbial Gene Catalogue v1.0 (2) (see methods). (7B) Venn diagram. Number of human gut metagenomics samples positive for unique genomic markers of either C. albicans or K. weizmannii out of 7,059 metagenomics datasets. Overlap of positive samples is in mixed colors. (7C) Number of human-vagina metagenomes positive for species-specific sequences of either C. albicans or K. weizmannii (ITS or unique regions). (7D) Antigen-reactive T cell enrichment (ARTE) analysis of anti-fungal CD4+ T cell reactivity in blood of human individuals. (n=10). (7E) ITS2 analysis of fecal samples of a cohort of 570 healthy individuals for presence of Candida and Kazachstania spp.

[0046] FIGS. 8A-8C include micrographs and a table showing the identification of novel fungal isolate. (8A) A gel analysis of PCR products amplifying ITS1 region of C. albicans and fungal isolate. (8B) Identification of novel fungal sp. based on ITS1 sequence. (8C) A representative example of PCR sentinel screening using PCR primers for specific ITS1 of K. weizmannii.

[0047] FIGS. 9A-9C include a sequence, a micrograph and graphs showing the generation of a K. weizmannii reporter strain. (9A) A sequence of modified fluorescent reporter miRFP670—further referred as ‘Mirf’. (9B) PCR validation of proper insertion of Mirf into K. weizmannii genome and thus generation of ENO1-Mirf fusion protein. (9C) Representative pictures of recovery of C. albicans ENO1-GFP and K. weizmannii ENO1-Mirf from feces of single-colonized followed by cohousing (started as Candida or Kazachstania).

[0048] FIGS. 10A-10D include graphs and fluorescent micrographs showing the impact of K. weizmannii colonization on microbiome. (10A) Diversity and abundance of fecal bacterial genus and species of K. weizmannii colonized vs. non-colonized group (controls) determined by 16S sequencing, collapsed to genus and species levels. (10B) Normalized abundance of fecal Lactobacillaceae (divided into specific Lactobacilli species) and Bifidobacteriaceae, determined by 16S sequencing. (10C-10D) In vivo competition between C. albicans and K. weizmannii upon co-administration in Germ-free animals and in antibiotics treated wild type mice: FACS and cultivation analysis of culture inoculate for p.o. administration. Representative picture of recovery of C. albicans ENO1-GFP and Kazachstania ENO1-Mirf from feces of colonized animals using flow cytometry and cultivation.

[0049] FIGS. 11A-11B include graphs and micrographs showing analysis of C. albicans-colonized immunosuppressed animals. (11A) Absolute weight monitoring (grams) of individual mice in C. albicans colonization, K. weizmannii colonized and non-colonized group. (11B) Representative pictures of kidneys and tongues (PAS staining) of immunosuppressed non-colonized and Kazachstania-colonized animals in end time point (day 10).

[0050] FIGS. 12A-12B include graphs showing analysis of K. weizmannii and C. albicans-colonized immunosuppressed animals. (12A) Absolute weight (grams) monitoring, comparison of immunosuppressed animals following C. albicans-colonization and K. weizmannii-outcompeted C. albicans colonization, monitoring till the end of experiment (day 10). (12B) Absolute weight (grams) monitoring showing the prolonged course of immunosuppressive treatment (mice sacrificed upon >20% weight loss), comparison of immunosuppressed animals following C. albicans-colonization and K. weizmannii-outcompeted C. albicans colonization, K. weizmannii colonized and non-colonized animals.

[0051] FIGS. 13A-13B include tables showing metagenome analysis. (13A) Metadata and read counts of 22 metagenomes from human vaginal origin, in which either K. weizmannii or C. albicans were identified. (13B) Metadata and read counts of 32 metagenomes from human gut origin, in which K. weizmannii was identified. Number of mapped reads of K. weizmannii or C. albicans is noted, along with metadata information collected on the metagenomics projects from NCBI Sequence Read Archive (SRA) data.

### DETAILED DESCRIPTION

### Isolated Fungus, and Composition

[0052] According to some embodiments, there is provided an isolated fungus deposited at the ATCC under the deposit number PTA-127318.

[0053] According to some embodiments, there is provided an isolated fungus belonging to the genus Kazachstania.

[0054] In some embodiments, the isolated fungus deposited at the ATCC under the deposit number PTA-127318 belongs to the genus Kazachstania.

[0055] In some embodiments, the isolated fungus is a type of yeast.

[0056] In some embodiments, the isolated fungus comprises at least one nucleic acid sequence as set forth in any one of SEQ ID Nos: 1-33.

[0057] According to some embodiments, there is provided a composition comprising a fungus. In some embodiments, the fungus comprises the isolated fungus disclosed herein. In some embodiments, at least 20%, at least 30%, at least 40%, at least 50%, at least 60%, at least 70%, at least 80%, at least 90%, at least 95%, at least 97%, at least 99%, or 100% of the fungus is the isolated fungus disclosed herein, or any value and range therebetween. Each possibility represents a separate embodiment of the invention.

[0058] In some embodiments, 20-100%, 40100%, 60-100%, 70-100%, or 80-100% of the fungus is the isolated fungus disclosed herein. Each possibility represents a separate embodiment of the invention.

[0059] In some embodiments, there is provided a fungal composition, wherein the isolated fungus disclosed herein constitutes at least 20%, at least 30%, at least 40%, at least 50%, at least 60%, at least 70%, at least 80%, at least 90%, at least 95%, at least 97%, at least 99%, or 100% of fungi of the fungal composition, or any value and range therebetween. Each possibility represents a separate embodiment of the invention.

[0060] In some embodiments, the isolated fungus disclosed herein constitutes 20-100%, 40100%, 60-100%, 70-100%, or 80-100% of fungi of the fungal composition. Each possibility represents a separate embodiment of the invention.

[0061] In some embodiments, the composition is for use in the treatment or prevention of a disease in a subject in need thereof.

[0062] In some embodiments, the composition is for use in the preparation of a medicament or a product for the treatment or prevention of a disease in a subject in need thereof.

[0063] In some embodiments, the disease comprises an autoimmune disease, an infectious disease or both.

[0064] In some embodiments, an autoimmune disease comprises a T helper 17 cells (Th17)-derived immunopathology. In some embodiments, an autoimmune disease comprises: (i) induced T helper 17 cells (Th17) activity; (ii) characterized by increased Th17 activity; or (iii) both (i) and (ii).

[0065] In some embodiments, Th17 activity is induced by a fungal infection. In some embodiments, Th17 activity comprises expression, translation, protein secretion, or any combination thereof, of at least one cytokine or a gene encoding thereof. In some embodiments, at least one cytokine comprises: interleukin (IL)-17A, IL-17F, IL-21, IL-22, CCL20, or any combination thereof.

[0066] In some embodiments, expression comprises gene expression, e.g., transcription of a gene to a messenger RNA (mRNA). In some embodiments, translation comprises production of a protein product encoded according to the gene as disclosed, or an mRNA transcript thereof.

[0067] Methods for determining any one of expression, translation, protein secretion, are common and would be apparent to one of skill in the art. Such methods include, but are not limited to, polymerase chain reaction (PCR), quantitative PCR (qPCR), western blot, enzyme linked immunosorbent assay (ELISA), flow cytometry, and others, some of which are exemplified herein below.

[0068] As used herein, the term “T helper 17 cells (Th17)-derived immunopathology” encompasses any disease, such as an autoimmune disease, that involves, is induced, comprises, characterized, enhanced, exaggerated, propagated, incited, or any combination thereof, Th17 cells.

[0069] In some embodiments, an autoimmune disease comprises multiple sclerosis, psoriasis, asthma, or any combination thereof.

[0070] In some embodiments, an infectious disease comprises or is an infection. In some embodiments, the infectious disease is a fungal infection. In some embodiments, the disease involves, is induced, comprises, characterized, enhanced, exaggerated, propagated, incited, or any combination thereof, by a fungus.

[0071] In some embodiments, a fungal infection comprises a Candida infection.

[0072] In some embodiments, a fungal infection comprises a Candida albicans infection.

[0073] In some embodiments, the composition is a synthetic or an artificial composition.

[0074] In some embodiments, the composition is formulated for colonization of a gut of a subject. In some embodiments, the composition is formulated for rectal delivery, oral delivery, parenteral delivery, or any combination thereof.

[0075] As used herein, the terms “synthetic” or “artificial” are interchangeable and refer to a manmade composition, such as in vitro grown, cultured, or formulated composition, e.g., in a lab or a comparable facility.

[0076] In some embodiments, the composition further comprises an acceptable carrier. In some embodiments, the carrier comprises or is a pharmaceutically acceptable carrier.

[0077] As used herein, the term “carrier”, “excipient”, or “adjuvant” refers to any component of a composition, that is not the active agent, such as, but not limited to the bacterial consortium disclosed herein.

[0078] In some embodiments, the carrier is a physiologically acceptable carrier. In one embodiment, the phrases “physiologically acceptable carrier” and “pharmaceutically acceptable carrier” which be interchangeably used refer to a carrier or a diluent that does not cause significant irritation to an organism and does not abrogate the biological activity and properties of the administered compound. An adjuvant is included under these phrases. In one embodiment, “excipient” refers to an inert substance added to a pharmaceutical composition to further facilitate administration of an active ingredient. In one embodiment, excipients include calcium carbonate, calcium phosphate, various sugars and types of starch, cellulose derivatives, gelatin, vegetable oils and polyethylene glycols.

[0079] As used herein, the term “carrier”, “excipient”, or “adjuvant” refers to any component of a pharmaceutical composition that is not the active agent. As used herein, the term “pharmaceutically acceptable carrier” refers to non-toxic, inert solid, semi-solid liquid filler, diluent, encapsulating material, formulation auxiliary of any type, or simply a sterile aqueous medium, such as saline. Some examples of the materials that can serve as pharmaceutically acceptable carriers are sugars, such as lactose, glucose and sucrose, starches such as corn starch and potato starch, cellulose and its derivatives such as sodium carboxymethyl cellulose, ethyl cellulose and cellulose acetate; powdered tragacanth; malt, gelatin, talc; excipients such as cocoa butter and suppository waxes; oils such as peanut oil, cottonseed oil, safflower oil, sesame oil, olive oil, corn oil and soybean oil; glycols, such as propylene glycol, polyols such as glycerin, sorbitol, mannitol and polyethylene glycol; esters such as ethyl oleate and ethyl laurate, agar; buffering agents such as magnesium hydroxide and aluminum hydroxide; alginic acid; pyrogen-free water; isotonic saline, Ringer's solution; ethyl alcohol and phosphate buffer solutions, as well as other non-toxic compatible substances used in pharmaceutical formulations. Some non-limiting examples of substances which can serve as a carrier herein include sugar, starch, cellulose and its derivatives, powered tragacanth, malt, gelatin, talc, stearic acid, magnesium stearate, calcium sulfate, vegetable oils, polyols, alginic acid, pyrogen-free water, isotonic saline, phosphate buffer solutions, cocoa butter (suppository base), emulsifier as well as other non-toxic pharmaceutically compatible substances used in other pharmaceutical formulations. Wetting agents and lubricants such as sodium lauryl sulfate, as well as coloring agents, flavoring agents, excipients, stabilizers, antioxidants, and preservatives may also be present. Any non-toxic, inert, and effective carrier may be used to formulate the compositions contemplated herein. Suitable pharmaceutically acceptable carriers, excipients, and diluents in this regard are well known to those of skill in the art, such as those described in The Merck Index, Thirteenth Edition, Budavari et al., Eds., Merck & Co., Inc., Rahway, N.J. (2001); the CTFA (Cosmetic, Toiletry, and Fragrance Association) International Cosmetic Ingredient Dictionary and Handbook, Tenth Edition (2004); and the “Inactive Ingredient Guide,” U.S. Food and Drug Administration (FDA) Center for Drug Evaluation and Research (CDER) Office of Management, the contents of all of which are hereby incorporated by reference in their entirety. Examples of pharmaceutically acceptable excipients, carriers and diluents useful in the present compositions include distilled water, physiological saline, Ringer's solution, dextrose solution, Hank's solution, and DMSO. These additional inactive components, as well as effective formulations and administration procedures, are well known in the art and are described in standard textbooks, such as Goodman and Gillman's: The Pharmacological Bases of Therapeutics, 8^{th} Ed., Gilman et al. Eds. Pergamon Press (1990); Remington's Pharmaceutical Sciences, 18^{th} Ed., Mack Publishing Co., Easton, Pa. (1990); and Remington: The Science and Practice of Pharmacy, 21^{st} Ed., Lippincott Williams & Wilkins, Philadelphia, Pa., (2005), each of which is incorporated by reference herein in its entirety. The presently described composition may also be contained in artificially created structures such as liposomes, ISCOMS, slow-releasing particles, and other vehicles which increase the half-life of the peptides or polypeptides in serum. Liposomes include emulsions, foams, micelles, insoluble monolayers, liquid crystals, phospholipid dispersions, lamellar layers and the like. Liposomes for use with the presently described peptides are formed from standard vesicle-forming lipids which generally include neutral and negatively charged phospholipids and a sterol, such as cholesterol. The selection of lipids is generally determined by considerations such as liposome size and stability in the blood. A variety of methods are available for preparing liposomes as reviewed, for example, by Coligan, J. E. et al, Current Protocols in Protein Science, 1999, John Wiley & Sons, Inc., New York, and see also U.S. Pat. Nos. 4,235,871, 4,501,728, 4,837,028, and 5,019,369.

### Methods of Use

[0080] According to some embodiments, there is provided a method for preventing or treating an autoimmune disease in a subject in need thereof.

[0081] According to some embodiments, there is provided a method for preventing or treating a fungal infection in a subject in need thereof.

[0082] In some embodiments, the method comprises administering to the subject a therapeutically effective amount of a pharmaceutical composition comprising the isolated fungus disclosed herein.

[0083] In some embodiments, the subject is afflicted with a fungal infection.

[0084] In some embodiments, the subject is a mammal subject, such as, but not limited to a human subject.

[0085] In some embodiments, treating comprises reducing the number or abundance of a fungus inducing the fungal infection in the subject.

[0086] In some embodiments, the number or abundance of a fungus inducing the fungal infection is reduced in the gastrointestinal tract (GI) of the subject.

[0087] In some embodiments, reduction of the number or abundance of a fungus inducing the fungal infection is determined in a sample obtained or derived from the subject.

[0088] In some embodiments, treating comprises reducing or inhibiting the activity of a fungus inducing the fungal infection in the subject. In some embodiments, reducing or inhibiting is of any one of: attachment, germination, penetration, host tissue colonization, growth, proliferation, metabolism, spore release, hyphae production, hyphae penetration, or any combination thereof, of a fungus inducing the fungal infection.

[0089] In some embodiments, the method further comprises a step of determining a number or abundance of a fungus inducing the fungal infection in the subject.

[0090] In some embodiments, the determining is in a sample obtained or derived from the subject. In some embodiments, the sample is obtained or derived from the GI of the subject.

[0091] In some embodiments, reducing is by at least 30%, at least 40%, at least 50%, at least 60%, at least 70%, at least 80%, at least 90%, at least 95%, at least 99%, or 100% compared to a control, or any value and range therebetween. Each possibility represents a separate embodiment of the invention.

[0092] In some embodiments, inhibiting comprises 100% reducing.

[0093] In some embodiments, reducing is for at least 4 days, at least 7 days, at least 14 days, at least 28 days, at least 2 months, at least 4 months, at least 6 months, or at least 1 year, or any value and range therebetween. Each possibility represents a separate embodiment of the invention.

[0094] In some embodiments, reducing is: (i) by at least 30%, at least 40%, at least 50%, at least 60%, at least 70%, at least 80%, at least 90%, at least 95%, at least 99%, or 100% compared to a control, or any value and range therebetween; and (ii) for at least 4 days, at least 7 days, at least 14 days, at least 28 days, at least 2 months, at least 4 months, at least 6 months, or at least 1 year, or any value and range therebetween. Each possibility represents a separate embodiment of the invention.

[0095] In some embodiments, a control comprises a subject not being treated according to there herein disclosed method. In some embodiments, a control comprises the subject prior to being treated or administered according to the herein disclosed method.

[0096] In some embodiments, treating comprises reducing the activity, abundance, or both, of Th 17 cells in the subject. In some embodiments, reducing is in the GI of the subject.

[0097] In some embodiments, administering comprises colonizing the gut of the subject with the isolated fungus.

[0098] In some embodiments, administering comprises retally administering. In some embodiments, administering comprises orally administering. In some embodiments, administering comprises rectally and orally administering.

[0099] As used herein the term “method” refers to manners, means, techniques and procedures for accomplishing a given task including, but not limited to, those manners, means, techniques and procedures either known to, or readily developed from known manners, means, techniques and procedures by practitioners of the chemical, pharmacological, biological, biochemical, and medical arts.

[0100] As used herein, the term “treating” includes abrogating, substantially inhibiting, slowing or reversing the progression of a condition, substantially ameliorating clinical or aesthetical symptoms of a condition or substantially preventing the appearance of clinical or aesthetical symptoms of a condition. Further, treat, treatment, treating, as used herein, means any of the following: the reduction in severity of a hemostatic disorder; the prophylaxis of one or more symptoms associated with a hemostatic disorder, e.g., a bleeding episode; the reduction in the duration of a disease course of a hemostatic disorder; the amelioration of one or more symptoms associated with a hemostatic disorder; the reduction in duration of a bleeding episode associated with a hemostatic disorder; the provision of beneficial effects to a subject with a hemostatic disorder, without necessarily curing the hemostatic disorder.

[0101] As used herein, the terms “preventing” or “prevention” of a disease, disorder, or condition encompasses the delay, prevention, suppression, or inhibition of the onset of a disease, disorder, or condition. As used in accordance with the presently described subject matter, the term “prevention” relates to a process of prophylaxis in which a subject is exposed to the presently described compositions or composition prior to the induction or onset of the disease/disorder process. This could be done where an individual has a genetic pedigree indicating a predisposition toward occurrence of the disease/disorder to be prevented. For example, this might be true of an individual whose ancestors show a predisposition toward certain types of, for example, inflammatory disorders. The term “suppression” is used to describe a condition wherein the disease/disorder process has already begun but obvious symptoms of the condition have yet to be realized. Thus, the cells of an individual may have the disease/disorder, but no outside signs of the disease/disorder have yet been clinically recognized. In either case, the term prophylaxis can be applied to encompass both prevention and suppression. Conversely, the term “treatment” refers to the clinical application of active agents to combat an already existing condition whose clinical presentation has already been realized in a patient.

[0102] As used herein, “treating” comprises ameliorating and/or preventing.

### Non-Human Animal and a Method for Preparing Same

[0103] According to some embodiments, there is provided a non-human animal subject. In some embodiments, the non-human animal subject comprises the isolated fungus disclosed herein.

[0104] In some embodiments, the non-human animal subject is gnotobiotic.

[0105] The term “gnotobiotic” would be apparent to one of skill in the art and encompasses any animal being characterized in a way that all microorganisms interacting with it are known and controlled.

[0106] In some embodiments, the non-human animal subject is a mammal. In some embodiments, the non-human animal subject is a rodent. In some embodiments, the non-human animal subject is mouse. In some embodiments, the non-human animal subject is a rat.

[0107] In some embodiments, the non-human animal subject comprises the isolated fungus disclosed herein, such as, in the gastrointestinal tract. In some embodiments, the gastrointestinal tract of the non-human animal subject is colonized with or comprises the isolated fungus disclosed herein. In some embodiments, the isolated fungus disclosed herein, colonizes or is present in the gastrointestinal tract of the non-human animal subject. In some embodiments, the isolated fungus disclosed herein, colonizes or is present in the gastrointestinal tract of the non-human animal subject, such that it constitutes at least 0.01%, 0.1%, 10% of fungus cells and/or fungal species in the gastrointestinal tract of the non-human animal subject, or any value and range therebetween. Each possibility represents a separate embodiment of the invention.

[0108] According to some embodiments, there is provided a method for producing the non-human animal subject disclosed herein.

[0109] In some embodiments, the method comprises colonizing a gastrointestinal tract of a non-human animal subject with an effective amount of the isolated fungus disclosed herein.

[0110] In some embodiments, the method comprises colonizing a gastrointestinal tract of a non-human animal subject with an effective amount of the composition disclosed herein.

[0111] In some embodiments, the method comprises colonizing a gastrointestinal tract of a non-human animal subject with an effective amount of the isolated fungus disclosed herein, and the composition disclosed herein.

[0112] In some embodiments, colonizing comprises rectally administering, orally administering, parenterally administering, or any combination thereof.

[0113] In some embodiments, the method further comprises rearing and/or culturing the non-human animal subject disclosed herein.

[0114] In some embodiments, the rearing and/or culturing is performed under pathogen free conditions, such as, specific pathogen free (SPF). In some embodiments, the rearing and/or culturing is performed under sterile conditions.

### Kit and Method for Determination

[0115] According to another aspect, there is provided a kit for genotypic determination of the presence of the isolated fungus disclosed herein. In some embodiments, the determination is in a sample. In some embodiments, the determination is in vitro or ex vivo determination, e.g., in a tube, a plate, or any equivalent thereof being apparent to a person of skill in the art as means for genotypic determination. In another embodiment, the present invention further provides a pair of primers capable of amplifying a nucleic acid molecule comprising any one of SEQ ID Nos: 1-33 in a polymerase chain reaction (PCR). In another embodiment, the present invention further provides a probe capable of hybridizing to a nucleic acid molecule comprising any one of SEQ ID Nos: 1-33. In another embodiment, a kit comprises primers and PCR reagents. In another embodiment, a kit comprises the probe.

[0116] In another embodiment, the present invention further provides a method for determining the presence of isolated fungus disclosed herein in a sample, comprising the steps of: (a) extracting DNA from the sample, (b) contacting the extracted DNA from step (a) with a pair of primers capable of hybridizing to a nucleic acid molecule comprising any one of SEQ ID Nos: 1-33 in a PCR, and obtaining a PCR composition; (c) subjecting the PCR composition to PCR amplification and obtaining a product; and (d) screening the product of step (c) to the presence of the nucleic acid molecule comprising any one of SEQ ID Nos: 1-33; wherein the presence of the nucleic acid molecule comprising any one of SEQ ID Nos: 1-33 within the product indicates that an isolated fungus as disclosed herein is present in the sample, thereby determining the presence of the isolated fungus as disclosed herein in the sample. In another embodiment, the absence of the nucleic acid comprising any one of SEQ ID Nos: 1-33 indicates that the sample is devoid of the isolated fungus as disclosed herein.

[0117] In some embodiments, PCR comprises denaturing double-stranded DNA in a sample (to separate the complementary strands), annealing the primers to the dissociated DNA strands, and extension reaction from the primers catalyzed by a thermostable DNA polymerase, the cycle is then repeated.

[0118] In some embodiments, a pair of DNA primers as described herein are specifically complementary to and hybridizing with opposite strands DNA with one to the left (5′) and one to the right (3′) of the target sequence within the nucleic acid sequence set forth in any one of SEQ ID Nos: 1-33, to be amplified. In some embodiments, the nucleic acid molecule set forth in any one of SEQ ID Nos: 1-33, is a specific marker of the isolated fungus disclosed herein. In some embodiments, the existence of a nucleic acid molecule comprising any one of SEQ ID Nos: 1-33 in a sample, or DNA extracted from a sample as described herein provides direct evidence for the presence of isolated fungus as described herein. In some embodiments, DNA is total DNA.

[0119] In one embodiment, a kit as described herein further comprises a DNA polymerase. In one embodiment, a kit as described herein further comprises a thermostable DNA polymerase.

[0120] As used herein, the term “screening” comprises identifying, isolating, enriching or any combination thereof. In one embodiment, methods for visualizing the nucleic acid molecule as described herein or the amplicons generated in the PCR is gel electrophoresis in polyacrylamide or agarose, followed by ethidium bromide staining. The observed sizes of the amplified target fragment—the nucleic acid molecule as described herein, should be identical to the predicted size based on the known nucleotide sequence as described and exemplified. In one embodiment, methods for visualizing the nucleic acid molecule as described herein or the amplicons generated in the PCR comprise Southern blot probing, dot-blots, or any known DNA hybridization technique wherein the nucleic acid molecule as described herein is utilized as a probe. In one embodiment, methods for visualizing the nucleic acid molecule as described herein or the amplicons generated in the PCR comprise a dissociation curve, a high-resolution melting curve, or any other DNA melting technique known in the art.

[0121] In some embodiments, the kit as described herein comprises a PCR buffer. In some embodiments, a PCR buffer comprises: 5 to 100 mM Tris-HCl and 20 to 100 mM KCl. In some embodiments, a PCR buffer further comprises 10 to 100 mM Magnesium Chloride. In some embodiments, the kit as described herein comprise a dNTP mixture. In some embodiments, the kit as described herein comprises DNA Polymerase such as but not limited to Taq DNA Polymerase. In some embodiments, the kit as described herein comprises distilled water.

[0122] An example deposit of the Kazachstania weizmannii of budding yeast has been deposited under ATCC PTA-127318.

### General

[0123] Where a range of values is provided, it is understood that each intervening value, to the tenth of the unit of the lower limit unless the context clearly dictates otherwise, between the upper and lower limit of that range and any other stated or intervening value in that stated range, is encompassed within the invention. The upper and lower limits of these smaller ranges may independently be included in the smaller ranges, and are also encompassed within the invention, subject to any specifically excluded limit in the stated range. Where the stated range includes one or both of the limits, ranges excluding either or both of those included limits are also included in the invention.

[0124] As used herein, the term “about” when combined with a value refers to plus and minus 10% of the reference value. For example, a length of about 1,000 nanometers (nm) refers to a length of 1,000 nm±100 nm.

[0125] It is noted that as used herein and in the appended claims, the singular forms “a,” “an,” and “the” include plural referents unless the context clearly dictates otherwise. Thus, for example, reference to “a polynucleotide” includes a plurality of such polynucleotides and reference to “the polypeptide” includes reference to one or more polypeptides and equivalents thereof known to those skilled in the art, and so forth. It is further noted that the claims may be drafted to exclude any optional element. As such, this statement is intended to serve as antecedent basis for use of such exclusive terminology as “solely,” “only” and the like in connection with the recitation of claim elements or use of a “negative” limitation.

[0126] In those instances where a convention analogous to “at least one of A, B, and C, etc.” is used, in general such a construction is intended in the sense one having skill in the art would understand the convention (e.g., “a system having at least one of A, B, and C” would include but not be limited to systems that have A alone, B alone, C alone, A and B together, A and C together, B and C together, and/or A, B, and C together, etc.). It will be further understood by those within the art that virtually any disjunctive word and/or phrase presenting two or more alternative terms, whether in the description, claims, or drawings, should be understood to contemplate the possibilities of including one of the terms, either of the terms, or both terms. For example, the phrase “A or B” will be understood to include the possibilities of “A” or “B” or “A and B”.

[0127] It is appreciated that certain features of the invention, which are, for clarity, described in the context of separate embodiments, may also be provided in combination in a single embodiment. Conversely, various features of the invention, which are, for brevity, described in the context of a single embodiment, may also be provided separately or in any suitable sub-combination. All combinations of the embodiments pertaining to the invention are specifically embraced by the present invention and are disclosed herein just as if each and every combination was individually and explicitly disclosed. In addition, all sub-combinations of the various embodiments and elements thereof are also specifically embraced by the present invention and are disclosed herein just as if each and every such sub-combination was individually and explicitly disclosed herein.

[0128] Additional objects, advantages, and novel features of the present invention will become apparent to one ordinarily skilled in the art upon examination of the following examples, which are not intended to be limiting. Additionally, each of the various embodiments and aspects of the present invention as delineated hereinabove and as claimed in the claims section below finds experimental support in the following examples.

[0129] Various embodiments and aspects of the present invention as delineated hereinabove and as claimed in the claims section below find experimental support in the following examples.

### DEPOSIT INFORMATION

[0130] A deposit of Kazachstania weizmannii budding yeast disclosed above and recited in the claims, has been made with the ATCC® Patent Depository (10801 University Boulevard, Manassas, Virginia 20110 USA) on Jun. 22, 2022. The accession number for those deposited budding yeast is PTA-127318. Upon issuance of a patent, all restrictions upon the deposit will be removed. The deposit has been accepted under the Budapest Treaty and will be maintained in the depository for a period of 30 years, or 5 years after the last request, or for the effective life of the patent, whichever is longer, and will be replaced if necessary during that period.

### EXAMPLES

[0131] Generally, the nomenclature used herein, and the laboratory procedures utilized in the present invention include molecular, biochemical, microbiological, and recombinant DNA techniques. Such techniques are thoroughly explained in the literature. See, for example, “Molecular Cloning: A laboratory Manual” Sambrook et al., (1989); “Current Protocols in Molecular Biology” Volumes I-III Ausubel, R. M., ed. (1994); Ausubel et al., “Current Protocols in Molecular Biology”, John Wiley and Sons, Baltimore, Maryland (1989); Perbal, “A Practical Guide to Molecular Cloning”, John Wiley & Sons, New York (1988); Watson et al., “Recombinant DNA”, Scientific American Books, New York; Birren et al. (eds) “Genome Analysis: A Laboratory Manual Series”, Vols. 1-4, Cold Spring Harbor Laboratory Press, New York (1998); methodologies as set forth in U.S. Pat. Nos. 4,666,828; 4,683,202; 4,801,531; 5,192,659 and 5,272,057; “Cell Biology: A Laboratory Handbook”, Volumes I-III Cellis, J. E., ed. (1994); “Culture of Animal Cells—A Manual of Basic Technique” by Freshney, Wiley-Liss, N. Y. (1994), Third Edition; “Current Protocols in Immunology” Volumes I-III Coligan J. E., ed. (1994); Stites et al. (eds), “Basic and Clinical Immunology” (8^{th} Edition), Appleton & Lange, Norwalk, CT (1994); Mishell and Shiigi (eds), “Strategies for Protein Purification and Characterization—A Laboratory Course Manual” CSHL Press (1996); all of which are incorporated by reference. Other general references are provided throughout this document.

### Materials and Methods

### Mice

[0132] This study involved wildtype and mutant mice (Cx3cr1Cre:Il23afl/fl (59, 60), all on C57BL/6 background. Unless indicated otherwise, animals were maintained in a specific-pathogen-free facility with chow and water provided ad libitum. Experiments were performed using sex- and age-matched controls. Animals were handled according to protocols approved by the Weizmann Institute Animal Care Committee as per international guidelines.

### Microbes

[0133] The recombinant C. albicans SC5314 strain expressing ENO1-GFP fusion protein is as described in Gonia et al., 2017. K. weizmannii was first cultivated from feces of mice housed in the Weizmann Institute SPF facility. The fluorescent K. weizmannii strain with a fusion of ENO1 to the modified miRFP670 (herein Kazachstania-Mirf) was generated using Crispr/Cas9 targeted mutagenesis. C. albicans strain was cultured on solid YPD media at 30° C. for 24 h-36 h. K. weizmannii and Kazachstania-Mirf were cultured on solid YPD media at 37° C.

### Fungal Gut Colonization

[0134] To establish intestinal colonization with C. albicans and K. weizmannii the drinking water of mice was supplemented with ampicillin (1 mg/mL, Ampicillin sodium salt 5 G SIGMA cat. 9518) 2-3 days prior to oral fungal inoculation. Mice were maintained on Abx-supplemented drinking water throughout the whole experiment, unless stated otherwise. For oral inoculation, C. albicans and K. weizmannii were grown on solid YPD media 30° C., or 37° C. respectively. Cultures were washed with PBS, and 107 yeast cells in 30 μl PBS were administered dropwise into the mouths of mice.

### Fungal-Mediated Pathology

[0135] Stably fungal-colonized mice were 5×s.c injected with 225 mg kg-1 with cortisone 21-acetate, following the scheme of injection every other day as described previously (Solis and Filler, 2012). Mice were monitored for weight loss. Following sacrifice, organs and feces were collected for histological examination, flow cytometry and fungal cultivations). If the weight dropped to 20% of the starting weight, mice were sacrificed according to IACUC protocol.

### Determination of CFU/g Tissue/Feces

[0136] For enumerating the number of recoverable C. albicans and K. weizmannii colony forming units, individual fecal pellets or each tissue from mice was sterilely dissected, weighed, and homogenized in sterile DDW. Serial dilutions on the organ homogenate were spread onto YPD media plates and the number of individual colonies enumerated after incubation at 37° C. for 24 hours.

Fecal DNA Extraction for 16S rRNA Gene Sequencing

[0137] DNeasy Blood & Tissue Kit (cat. 69504) kit was used according to the manufacturer's instructions for fecal DNA isolation for 16S sequencing. Prior the kit isolation, frozen fecal samples were digested with proteinase K in ALT buffer of the kit at 56° C., followed by bead-beating with sterile zirconia beads (Ø0.1 mm, BioSpec, Cat. No. 11079101).

16S rRNA Gene Sequencing and Taxonomic Assignment

[0138] Demultiplexed reads were uploaded into CLC genomics workbench (Quiagen) and analyzed using their 16S microbiome pipeline. The analysis workflow consisting of quality filtration of the sequence data, and operational taxonomic unit (OTU) clustering was performed with default parameter settings. The adaptor sequence was removed and the reads with a quality score lower than 25 or length <150 were discarded. The maximum number of acceptable ambiguous nucleotides was set to 2 and the length of the reads was fixed at 200-500 bp. Chimeric sequences and singletons were detected and discarded. The remaining unique reads were used for OTU clustering, which was performed by alignment to the SILVA database at 97% sequence similarity.

Bioinformatics Analysis of 16S rRNA Gene Sequencing Data

[0139] Visualization of OTU counts was done using the Marker Data profiling pipeline of MicrobiomeAnalyst. Counts were filtered to include OTUs with minimum 2 counts (mean abundance value) and scaled to library total sum. Abundance profiles were generated after merging small taxa with counts <10 based on their median counts. In order to explore uncultured species (D6 level), the annotations of ‘uncultured bacteria’ were concatenated to their family names (D4 level). Results were used for Alpha diversity analysis using Shannon diversity, T-test on filtered data, and Beta Diversity (PCoA using Bray-Curtis index) plots.

### Bioinformatics Screening of Human Shotgun Metagenomics Datasets to Identify Fungi Species

Identification of Genomic Regions Unique to K. weizmannii and C. albicans

[0140] In order to identify K. weizmannii and C. albicans in human metagenomics datasets, the inventors first selected a set of nucleotide regions that are unique to the genome sequence of either K. weizmannii or C. albicans and were used to specifically identify these fungi in the background of other fungi, bacteria, and other species in the metagenomes. The genome assemblies of K. weizmannii and C. albicans were compared to 22 genomes (genus Kazachstania) and 11 genomes (genus Candida), respectively, using the GView Server, with analysis type ‘Unique genome’ with default parameters except for the Genetic code, where ‘Standard’ was used. Nucleotide regions unique to each target genome were collected, and further compared to the NCBI nt database using BLAST (E-value <0.0001) in order to exclude regions that are also present in bacteria or other non-fungal organisms. This search resulted in 179 nucleotide sequences specific to K. weizmannii, and 904 nucleotide sequences specific to C. albicans.

Screening Shotgun Metagenomics Datasets Using Unique Kazachstania sp. and C. albicans Queries

[0141] A dataset of 13,174 metagenomes, collected from the Global Microbial Gene Catalog v1.0 (GMGC (2)) was screened to identify sequences that originate from either Kazachstania sp. or C. albicans genomes. Each GMGC metagenome was originally stratified into habitats, and its raw nucleotide sequences were assembled into thousands of contigs (provided to us by Luis Pedro Coelho). All assembled contigs from each metagenomics sample were used as a query and were searched against the set of unique K. weizmannii or C. albicans sequences constructed as described above, as a reference. Alignments were generated using bowtie2 algorithm (version 2.3.5.1, using local mode). In order to broaden the search to genus level, all metagenomics assemblies were also mapped to a set of genus-specific rDNA and ITS sequences, extracted from K. weizmannii or C. albicans genomes (namely 25Sa, 18Sa, 5.8Sa, ITS1a, ITS2a, ETS1a, ETS2a). To avoid biases in the specificity of ITS searches, the inventors counted only sequences which mapped to ITS regions without mutations.

Genomic DNA Isolation from Fungal Cultures

[0142] Fungal pellet was dissolved in 2 ml lysis buffer (100 mM Tris pH 8.0, 50 mM EDTA, 1% SDS) and sonicated for 10 s. Three hundred (300) μl of the supernatant was transferred to 300 μl 7 M ammonium acetate pH 7.0, vortexed and incubated 5 min at 65° C. followed by 3 minutes on ice. Five hundred (500) μl chloroform was added and the solution was mixed by inverting the tube. Samples were spun 10 min at 13,000 rpm at 4° C. Three hundred (300) μl of the upper phase was transferred to 400 μl isopropanol-filled tubes and incubated for 5 min on ice. Samples were spun 10 min at 13,000 rpm at 4° C. and pellet was washed with 800 μl 70% EtOH, spun 1 min at maximum speed, air dried and dissolved in DDW.

### Genome Sequencing, Annotation, and Comparison

[0143] Sequencing and hybrid (Nanopore and Illumina) assembly were performed by SeqCenter (Pittsburgh, PA), as follows: Illumina—Sample libraries were prepared using an Illumina DNA Prep kit and IDT 10 bp UDI indices and sequenced on an Illumina NextSeq 2000 producing 2×151 bp reads. The data was demultiplexed and adapters removed using bcl2fastq [2](v2.20.0.445) (support.illumina.com/sequencing/sequencing_software/bcl2fastq-conversion-software.html). Nanopore—Samples were prepared for sequencing using Oxford Nanopore's “Genomic DNA by Ligation” kit (SQK-LSK109) and protocol. All samples were run on Nanopore R9 flow cells (R9.4.1) on a MinION. Basecalling was performed with Guppy (version 4.2.2), in high-accuracy mode (Default parameters +effbaf8). Quality control and adapter trimming was performed with porechop (https://github.com/rrwick/Porechop) version 0.2.2_seqan2.1.1 with the default parameters. Long read assembly with ONT reads was performed with flye (version 2.8). The long read assembly was polished with pilon (1.23). Annotation was performed with the Yeast Gene Annotation Pipeline (YGAP) with the Post-WGD settings, and Companion for Fungi with a reference organism of Candida glabrata CBS138. The output of both programs was compared with CD-HIT (version 4.8.1) with c=1, to reduce redundancy, and the remaining genes combined with YGAP as the base annotation, using in-house scripts. Whole genome comparison of 25 species of Kazachstania on the basis of K. weizmannii was performed with CCT (CGView Comparison Tool) (63), with a BlastN e-value of e⁻¹⁰.

### Phylogenetic Analysis

[0144] The d1d2 region of 26SrDNA of various species were aligned with both ClustalW2.1 and Muscle 3.8.31. Phylogenetic trees were constructed with Maximum likelihood and DNA parsimony, using PhyML 3.0, DNAML, DNAPARS and DNAPENNY in the Phylip package (3.697) (Felsenstein 2005). The Phylip trees were then processed through Consense. Trees with similar topologies were obtained, and the Muscle/DNAPENNY tree is shown. The tree was visualized with iTol version 6.

qPCR Quantification

[0145] Twenty to twenty five (20-25) mg of feces or tissue were surgically resected including its content, homogenized using Lysing Matrix C (MP biomedicals) with the Omni Bead Ruptor 24 (Omni international, inc) followed by DNA extraction using Quick-DNA plus kit (Zymo Research) according to manufacturer's instructions. 10 ng of isolated DNA were used for quantitative PCR reaction using Fast SYBR green Master Mix (Thermo Fisher Scientific, cat 4385614). Reaction was performed on the Quantstudio 7 Flex Real-Time PCR system (Thermo Fisher Scientific) using the fast SYBR 10 μl program. Fungal DNA content in the samples was calculated using standard curves and normalized to tissue weight. For detection of C. albicans the following primers were used: forward: 5′-GGTGTTGAGCAATACGAC-3′ (SEQ ID NO: 29), reverse: 5′-AGACCTAAGCCATTGTC-3′ (SEQ ID NO: 30). For the detection of K. weizmannii the following primers were used: forward: 5′-ATGCACGTTTTTCTGGGTGC-3′ (SEQ ID NO: 31) reverse: 5′-GTATCGCATTTCGCTGCGTT-3′ (SEQ ID NO: 32).

### In Vitro Serum Antibody Binding Assay

[0146] Blood was collected from mice at rested at RT for 1 hour, followed by centrifugation 2,000 g 10 min. Serum supernatant was collected and froze at −80° C. until use. Cultured fungi were normalized to OD600=1 in PBS supplemented with 1% bovine serum albumin and 0.01% sodium azide (PBA solution). Cultured fungi were incubated with 20× diluted mouse serum on ice for 45 minutes, then washed twice with PBA, followed by staining with anti-mouse IgA and IgG. Samples were recorded on Cytek Aurora and analyzed in FlowJo (Treestar). Antibody binding intensity was normalized to the negative controls. Isotype control, non-stained and no-serum were used as negative controls.

### Tissue Isolation for Flow Cytometry

[0147] Mesenteric and peripheral lymph nodes were aseptically resected out into sterile, ice-cold PBS and mashed manually using a 1 mL syringe plunger through a 40 μm nylon cell strainer. One hundred to two hundred (100-200) μL of mouse blood was collected from submandibular vein, resuspended in 15 μl of heparin (Sigma) to prevent coagulation, followed by lysis with 1 ml ACK buffer (8.29 g/ml NH₄Cl, and 1 g/l KHCO₃, 37.2 mg/l Na-EDTA) for 5 min RT and subsequent centrifugation.

### Cell Staining, Stimulation and Flow Cytometry and Microscopy

[0148] Methods adhered to published guidelines (Cossarizza et al., 2019). Flow cytometry samples were recorded on BD LSR Fortessa 4 lasers or Cytek Aurora followed by data analysis using the FlowJo software (Treestar).

### Immunohistochemistry and Histology

[0149] Mice were euthanized and intestines, kidneys and tongue were excised and fixed overnight in 4% paraformaldehyde at 4° C. Paraffin embedding and sectioning was performed by the institutional histology unit. For immunohistochemistry of gut samples, slides were deparaffinized by 2 washes of Xylene followed by 100%, 96%, 70% EtOH and three washes with PBS. Slides were incubated for 30 minutes in 1% hydrogen peroxide in PBS at room temperature in the dark. After washing three times in PBS, slides were boiled for 10 minutes in Citric acid buffer pH 6.0 (10 mM citric acid and 0.05% Tween-20 in DDW), then washed with PBS three times. Next, slides were blocked in BP buffer (0.3% Triton X-100, 2% horse serum and 1% bovine serum albumin in PBS) for 1 h, then incubated overnight at 4° C. with a 1:200 dilution of the primary antibody (anti-Candida) in BP buffer. In the following day, slides were washed three times in PBS and conjugated with a secondary antibody diluted 1:200 (Cy3 anti-Rabbit) in BP buffer for 1 h at 25° C. Samples were washed three times with PBS and incubated for 5 min with DAPI (1:10,000), then mounted with Immu-Mount (Epredia). Sections were imaged using Zeiss 880 confocal laser scanning microscope. Images were processed using the Zeiss Zen blue software. For histopathology of typical tongue or kidney fungal lesions in the mouse model of immunosuppression, paraffin sections were stained with periodic acid-Schiff (PAS) or H&E and slides were captured using a Panoramic SCAN II (3DHISTECH) and analyzed using CaseViewer software (3DHISTECH).

| REAGENT or RESOURCE | SOURCE | IDENTIFIER |
|---|---|---|
| IgA, PE | Invitrogen | Cat#12-4204-81 |
| IgG, Alexa Fluor ® 594 | BioLegend | Cat#405326 |
| CD45, Violet 450 | Biogems | Cat#07512-40-108 |
| CD4, Alexa Fluor ® 647 | BioLegend | Cat#100412 |
| TCR β chain, FITC | BioLegend | Cat#109206 |
| IgG1 κ Isotype Ctrl, PE | BioLegend | Cat#400407 |
| ROR gamma (t) | Invitrogen | Cat#12-69981-80 |
| TCR β chain, PE/Cyanine5 | BioLegend | Cat#109209 |
| CD274, PE/Dazzle ™ 594 | BioLegend | Cat#124323 |
| CD43, Alexa Fluor ® 700 | BioLegend | Cat#143214 |
| Ly6C, Pacific Blue ™ | BioLegend | Cat#128014 |
| Ly6G, FITC | BioLegend | Cat#127605 |
| CD115, APC/Cyanine7 | BioLegend | Cat#135532 |
| CD11b, PE | BioLegend | Cat#101207 |
| CD220, APC | BioLegend | Cat#103212 |
| Zombie Aqua ™ Fixable Viability Kit | BioLegend | Cat#423102 |
| Anti-Candida albicans | Abcam | Cat# ab53891 |
| Cy3-AffiniPure Donkey Anti-Rabbit | Jackson Immunoresearch | Cat#711165152 |
| purified CD16/32 | BioLegend | Cat#101302 |
| Calcofluor white | | |
| Cell Activation Cocktail | BioLegend | Cat#423302 |
| Brefeldin A Solution | BioLegend | Cat#420601 |
| Fixation/Permeablization Kit | BD Bioscience | Cat# 554714 |
| True-Nuclear ™ Transcription Factor Buffer Set | BioLegend | Cat#424401 |

### Antigen-Reactive T Cell Enrichment (ARTE)

[0150] PBMCs were freshly isolated from EDTA blood samples on the day of blood donation by density gradient centrifugation (Biocoll; Biochrom, Berlin, Germany). Antigen-reactive T cell enrichment (ARTE) was performed as follows. Briefly, 2×10e⁷ PBMCs were plated in RPMI-1640 medium (GIBCO), supplemented with 5% (v/v) human AB-serum (Sigma Aldrich, Schnelldorf, Germany) at a cell density of 1×10e⁷ PBMCs/2 cm² in cell culture plates and stimulated with 40 μg/ml fungal lysates for 7 hr in presence of 1 μg/ml CD40 and 1 μg/ml CD28 pure antibody (both Miltenyi Biotec, Bergisch Gladbach, Germany). 1 μg/ml Brefeldin A (Sigma Aldrich) was added for the last 2 hr. Cells were labeled with CD154-Biotin followed by anti-Biotin MicroBeads (CD154 MicroBead Kit; Miltenyi Biotec) and magnetically enriched by two sequential MS columns (Miltenyi Biotec). Surface staining was performed on the first column, followed by fixation, permeabilization (Inside stain Kit, Miltenyi Biotec) and intracellular staining on the second column. The following antibodies were used: CD4-APC-Vio770 (M-T466), CD8-VioGreen (REA734), CD14-VioGreen (REA599), CD20-VioGreen (LT20), Integrin-b7-PE-Vio770 (REA441) (all Miltenyi Biotec); CD45RA-PE-Cy5 (HI100), IFN-γ-BV785 (clone: 4S.B3) (both Biolegend); IL-17A-BV650 (clone: N49-653), IL-22-PerCP-eFluor710 (clone: IL22JOP) (both BD Biosciences). Viobility 405/520 Fixable Dye (Miltenyi Biotec) was used to exclude dead cells. Data were acquired on a LSR Fortessa (BD Bioscience, San Jose, CA, USA).

[0151] Frequencies of antigen-specific T cells were determined based on the total cell count of CD154+ T cells after enrichment, normalized to the total number of CD4+ T cells applied on the column. For each stimulation, background cells enriched from the non-stimulated control were subtracted.

### ITS2 Amplification and Sequencing of Human Stool Samples

[0152] ITS2 sequencing was used for fungal identification. Briefly, ITS2 sequencing applied to 570 human stool samples and 6 controls. PCR was performed on 10 ng of DNA per sample (or the maximum available). Three PCR batches were required with 2 wells left empty as library controls in each batch. Forward primer ITS86F 5′-759 GTGAATCATCGAATCTTTGAA-3′ (SEQ ID NO: 33) and reverse primer ITS4 with rd2 Illumina adaptor 5′-AGACGTGTGCTCTTCCGATCTTCCTCCGCTTATTGATATGC-3′ (SEQ ID NO: 94) were used for the first PCR amplification. PCR mix per sample contained 5 μl sample DNA, 0.2 M per primer (primers purchased from Sigma), 0.02 unit/μl of Phusion Hot Start II DNA Polymerase (Thermo Scientific 763 F549), 10 μl of ×5 Phusion HS HF buffer, 0.2 mM dNTPs (Larova GmbH), 31.5 μl ultra-pure water, for a total reaction volume of 50 μl. PCR conditions used were 98° C. 2 min, (98° C. 10 sec, 55° C. 15 sec, 72° C. 35 sec)×30, 72° C. 5 min. A second PCR was performed to attach Illumina adaptors and barcode per sample for 6 additional cycles. Samples from the 1^{st} PCR were diluted 10-fold and added to the PCR mix as described above. Primers of second PCR included: forward primer P5-rd1-768 ITS86F 5′-AATGATACGGCGACCACCGAGATCTACACTCTTTCCCTACACGACGCTCTTCCG ATCTGTGAATCATCGAATCTTTGAA-3′ (SEQ ID NO: 35), and reverse primer 5′-CAAGCAGAAGACGGCATACGAGATNNNNNNNNTGACTGGAGTTCAGACGTGTG CTCTTCCGATCT-3′ (SEQ ID NO: 36). Every 96 samples were combined for a single mix by adding 14 μl from each. Before mixing, an aliquot from each of the samples was run on an agarose gel. In cases where the amplified bands were very strong, samples were diluted between 5 and 20-fold before they were added to the mix. Each sample mix was cleaned with QIAquick PCR purification kit (QIAGEN, catalog #28104). Two cleaned sample mixes were then combined into a single mix of 192 samples, and size selection was performed with Agencourt AMPure XP beads (Beckman Coulter #A63881) to remove any excess primers. The beads to sample ratio was 0.85 to 1. Samples were then run in three libraries on the Miseq v3 600 cycles paired-end with 30% PhiX.

### ITS2 Sequencing Analysis

[0153] The ITS2 classification pipeline was built with Python 3.6. For each sequencing library, paired-end reads were joined using PEAR (version 0.9.10) followed by filtering of merged reads by minimum length of 80 bp and trimming of primers from both ends with cutadapt (version 1.17). Within the QIIME 2 environment (version 2018.8), Dada2 was used to create amplicon sequence variants (ASVs), then ITSx (version 1.1b1) was used to delineate ASVs to ITS2 regions (removing preceding 5.8S and trailing 28S sequences). A taxonomic naive bayesian classifier in QIIME 2 (74) was trained on the UNITE database (version 8, dynamic, sh_taxonomy_qiime_ver8_dynamic_04.02.2020.txt) and used to classify the 180 processed ASVs. 91 percent of raw reads were classified to species level (Table 1).

| | Number | Percent |
|---|---|---|
| Kingdom | 29339412 | 100 |
| Phylum | 29339412 | 100 |
| Class | 29339412 | 100 |
| Order | 29339412 | 100 |
| Family | 28453602 | 96.98082 |
| Genus | 28423083 | 96.8768 |
| Species | 26935819 | 91.80763 |

[0154] Most of the downstream analysis and plots were performed with R version 4.1.1 and phyloseq 1.34.0. ASVs were filtered by the ITSx and UNITE classifications to include fungal reads only. 119 ASVs that were classified by ITSx as fungi were included in the downstream analysis, representing over 97.5% of reads. Out of the remaining 61 ASVs that were classified by ITSx as non-fungal (Tracheophyta (T), land plants), one (fid65) was included in the downstream analysis since its classification as fungi reached all the way to species level by UNITE and was validated by NCBI BLAST to be fungal. Next, the inventors introduced two types of data normalization: (1) Library normalization, where samples were normalized to account for the difference in the average number of reads/sample per library. (2) Dilution normalization: ASV reads were multiplied by the dilution factor per sample to reflect their true original load. Next, ASVs were aggregated based on UNITE classification, to species level when possible. ASVs that could not be classified to species level, were grouped together by the lowest known phylogenetic level, and labeled “Other”. A total of 55 species were detected, 13 of which were also detected in control samples, but with a maximum of 100 reads per sample demonstrating a very mild read leakage of the higher abundant species in the library, e.g., Saccharomyces cerevisiae. Therefore, flooring of species with less than 100 reads per sample was applied. Lastly, data were aggregated by summing all reads in each taxonomic level by the associated taxa in the level above it.

### Biolog

[0155] Quantification of cytotoxicity (LDH assay). Differentiated C2BBe1 cells in 96-well plates were infected for a defined time period with 10⁴ C. albicans, S. cerevisiae and K. weizmannii. cells/well. After coincubation, epithelial damage was quantified by measuring LDH release using a cytotoxicity detection kit (Roche) according to the manufacturer's instructions.

### Filamentation Assay

[0156] C. albicans and K. weizmannii were tested for their ability to the filament in liquid filamentation conditions. Cells grown overnight in liquid YPD were centrifuged and washed 2× with PBS prior to the experiment and strains were diluted on the same OD. Yeast cells were incubated for 3 hr or 5 h in 30° C., 37° C. or 42° C. with shaking, then directly fixed with 4% PFA in PBS for 30 min, followed by wash with PBS and images were captured by bright Zeiss field microscope.

### Statistical Analysis

[0157] In all experiments, data are presented as the mean±SEM unless stated otherwise. Statistical significance was defined as P<0.05. The number of animals is indicated as n. Animals of the same age, sex, and genetic background were randomly assigned to treatment groups.

### Data Availability

[0158] The data have been deposited to BioProject accession number PRJNA949686 in the NCBI BioProject database (ncbi.nlm.nih.gov/bioproject/).

### Example 1

### Identification of a Novel Commensal Fungus in Laboratory Mice

[0159] To probe for a role of myeloid cells in anti-fungal immunity, the inventors used mice that harbor a corresponding IL-23 deficiency and attempted to colonize them with C. albicans. Specifically, the inventors used a protocol involving prior conditioning of animals with antibiotics (Abx) (27) (FIG. 1A). Ampicillin-exposed wildtype (WT) mice could be readily and persistently seeded with C. albicans SC5314 harboring a GFP reporter (FIG. 1B). Surprisingly, however, the inventors consistently failed to colonize the mutant mice with C. albicans (FIG. 1C). Rather, following plating of the fecal microbiota of these animals, the inventors noted the growth of another yeast-like fungus of distinct morphology (FIGS. 1D-1E). Sequencing of DNA isolated from the plated fungus using the internal transcribed spacer (ITS) as yeast barcode tentatively identified the fungus as a member of the Kazachstania clade (FIGS. 1A-1B). This genus is composed of over 50 species found in both anthropic and non-anthropic environments and associated with sourdough production. Whole genome sequencing of the new fungus revealed the characteristic gene duplications of the Saccharomycetaceae family and established it as a novel Kazachstania strain, which the inventors term Kazachstania weizmannii. Phylogenetic analysis of 26S rDNA confirmed the assignment of K. weizmannii to the Saccharomycetaceae clade (FIG. 1F), and comparison to other Kazachstania species (FIG. 1G) placed it together with K. heterogenica, a fungus found in rodent feces, and in a sister clade with K sp. Y4206, a species isolated from human feces, and K. pintolopesii, from guinea pig peritoneal fluid. Comparison of the K. weizmannii genome with other full length Kazachstania genomes (FIG. 111) showed that K. sp Y4206 is the closest species, followed by K. bovina, K. telluris, and K. slooffiae.

[0160] Of note, although the inventors originally discovered the novel Kazachstania species in mutant mice that might have impaired anti-fungal immunity, sentinel screening in the animal facilities with the ITS assay revealed that K. weizmannii was widespread, irrespective of animal genotypes (FIG. 8C).

### Example 2

### In Vitro Characterization of K. weizmannii

[0161] When cultured in a number of defined conditions frequently found in the human body, such as serum exposure or, neutral pH and or 37° C., C. albicans forms hyphae the same challenges did not invoke the same morphology switch in K. weizmannii (FIG. 2A). Instead, the fungus continued to grow in a yeast-like morphology.

[0162] Comprehensive Biolog analysis revealed preferences for carbon and nitrogen sources of C. albicans and K. weizmannii (FIGS. 2B-2C). K. weizmannii was for instance superior in growing with 2-Deoxy-D-Ribose and D-Glucosamine, as well as leucine dipeptides, while C. albicans could better thrive on maltose, D-galactose, urea and glycine dipeptides. The two fungi also displayed differential resistance to chemical inhibitors (FIG. 2D). Specifically, K. weizmannii showed as compared to C. albicans relative resistance to propriconazole and fucinazole, while the yeast was more sensitive to chlorides and bromides. When cultured in YPD media C. albicans and K. weizmannii displayed similar pH optima (FIG. 2E). Interestingly and in contrast to the observation for the gut, in in vitro cocultures, C. albicans and K. weizmannii grew together without interference (FIG. 2F).

### Example 3

### K. weizmannii is a Murine Commensal that Antagonizes C. albicans Colonization

[0163] To facilitate the comparative analysis of K. weizmannii and C. albicans SC5314, the inventors generated a K. weizmannii strain harboring a gene encoding a red fluorescent reporter in the enolase 1 (ENO-1) locus, mimicking the C. albicans SC5314-GFP configuration (FIGS. 3A, 3C, and 9B-9C).

[0164] Colonization of WT animals by K. weizmannii did not require prior Abx treatment, in contrast to the colonization with C. albicans (FIGS. 3B-3C). C57Bl/6 mice could be readily colonized by oral K. weizmannii inoculation or cohousing with animals bearing the fungus. Interestingly, and in line with the original observation disclosed herein, when Abx-treated mice were co-inoculated with a 1:1 mixture of K. weizmannii and C. albicans, Candida colonization was prevented (FIGS. 3D-3G). To test if K. weizmannii would also outcompete established commensal C. albicans, the inventors stably colonized mice with C. albicans (on Abx) and then cohoused the animals with mice harboring K. weizmannii (FIG. 3H). Coprophagy led to the progressive rapid ousting of C. albicans by K. weizmannii, leaving only a residual C. albicans population. Colonization with C. albicans was further reduced upon Abx withdrawal (FIGS. 3I-3J).

[0165] C. albicans colonization of mice is sensitive to the microbiome composition. The competition between the two fungi that the inventors observed could hence be due to alterations of the bacterial landscape. Comparison of the microbiome of K. weizmannii—colonized mice and non-colonized controls using 16S sequencing revealed, however, only minor consistent changes (FIG. 10A). Moreover, also the abundance of Lactobacillae that are known to compete with C. albicans and to impede colonization of the murine gut, was unaltered (FIG. 10B). To further probe the potential involvement of bacterial microbiota in fungal competition, the inventors orally inoculated germ-free animals with a mixture of the two fungi. Also in these mice, K. weizmannii prevented efficient C. albicans colonization (FIGS. 3K-3M, and 10C-10D). Collectively, these data establish that K. weizmannii can outcompete C. albicans including previously colonized animals and that the observed inter-fungal competition is independent of bacterial components.

### Example 4

### Comparative Analysis of the Host Immune Response to C. albicans and K. weizmannii

[0166] Fungi are known to affect host granulopoiesis and induce both humoral and cellular immunity. In line with these reports, Abx-treated animals colonized with C. albicans showed an expanded neutrophil compartment in the blood. In contrast, K. weizmannii-colonized animals displayed no significantly altered abundance of granulocytes, classical or non-classical monocytes (FIG. 4A).

[0167] Intestinal IgA responses to C. albicans were proposed to balance commensalism vs. pathogenicity by controlling the critical morphological hyphae-to-yeast switch of the fungus. To assess humoral immunity against the two fungal commensals, the inventors analyzed sera of colonized animals for reactivity to cultured K. weizmannii or C. albicans. Colonization with either yeast induced robust anti-fungal serum IgA and IgG titers in most animals. (FIGS. 4B-4C). The induced antibodies were mostly, but not always, cross-reactive between the two fungal species.

[0168] Mucosa-associated fungi, and specifically C. albicans have been shown to induce Th17 type cellular immune response. Accordingly, C. albicans-colonized animals displayed an expansion of Th17 cells in gut mucosa-associated mesenteric and peripheral lymph nodes (FIGS. 4D-4E). In contrast, even after extended colonization, no Th17 cell expansion was observed in K. weizmannii-colonized animals.

[0169] To directly gauge the impact of K. weizmannii on host cells the inventors performed an endothelial cell (EC) co-culture assay. EC exposure to C. albicans resulted in EC damage as measured by LDH release. In contrast and similar to co-culture with S. cerevisiae, K. weizmannii did not affect EC viability (FIG. 4F). However, co-infection of EC cultures with K. weizmannii and C. albicans did not prevent EC damage.

[0170] Taken together, colonization of Abx-treated animals with both C. albicans and K. weizmannii induced largely cross-reactive humoral immune responses reflected by serum IgA and IgG titers. The characteristic anti-fungal Th17 response was restricted to C. albicans-colonized mice. In combination with the in vitro culture results, these data suggest that K. weizmannii is an innocuous commensal.

### Example 5

### Commensal C. albicans, but not K. weizmannii Causes Pathology in Immune-Suppressed Animals

[0171] Invasive candidiasis is widely recognized as a major cause of morbidity and mortality in the healthcare environment, often associated with an underlying immune-compromised state. Candidiasis can be induced in otherwise resistant, orally C. albicans-challenged animals by immune-suppression. To test whether corticosteroid treatment would cause C. albicans and K. weizmannii to spread from established commensal reservoirs and cause systemic pathology, the inventors treated mice that were stably colonized with the respective fungi with cortisone 21-acetate boli (225 mg/kg s.c) every other day (FIG. 5A). Unlike control mice, C. albicans-harboring animals lost significant weight after one week of treatment and became moribund (FIG. 5B). Animals displayed prominent tongue candidiasis and fungal growth in the kidneys (FIGS. 5C-5D). In stark contrast, immuno-suppressed animals colonized with K. weizmannii showed neither weight loss nor evidence of fungal spread (FIGS. 5E-5I, and 11A-11B). These data establish that in mice, K. weizmannii is innocuous and even in immunosuppressed animals neither breaches the intestinal barrier to spread systemically nor causes other pathologies.

### Example 6

### Competitive Commensalism Mitigates Candidiasis

[0172] Since K. weizmannii exposure during competitive seeding and cohousing significantly reduces the commensal C. albicans burden in colonized animals (FIG. 3J), the inventors next examined whether this commensal competition would also mitigate candidiasis pathology. To simplify the mode of Kazachstania administration, the inventors treated Candida colonized animals with Kazachstania-supplemented drinking water (FIG. 6A) prior to immunosuppression. As expected, also in this setting Kazachstania efficiently expelled C. albicans from colonized animals (FIG. 6B). Indeed, exposure of immunosuppressed C. albicans-colonized animals to K. weizmannii significantly delayed the weight loss and systemic yeast spread, as indicated by the absence of kidney colonization (FIGS. 6C-6E, and 12A). As to expect, the animals were, however, not permanently protected. Rather, their residual commensal C. albicans burden eventually disseminated and caused pathology (FIGS. 6F-6G, and 12B). Collectively these results establish that K. weizmannii out-competes C. albicans from the commensal microbiome and thereby reducing the cause of pathology, mitigates candidiasis and improves the health status of immunosuppressed animals.

### Example 7

### Kazachstania Presence in Human Metagenomes

[0173] Candida species are a major component of the human mycobiota, with C. albicans being the most prevalent. Despite their established role in dough fermentation, Kazachstania spp. presence in healthy humans or during pathology-associated dysbiosis has very rarely been reported. To gauge the abundance of Kazachstania spp., and in particular, the newly identified K. weizmannii disclosed herein in human microbiota, the inventors designed a bioinformatic screen to detect genomic regions specific to these fungi, out of shotgun sequence information from a collection of 13,174 published metagenomics data sets (FIG. 7A). Among 7,059 human stool samples analyzed, the inventors identified 32 metagenomes that displayed specific evidence for K. weizmannii and 9,236 reads that harbored Kazachstania spp. sequences (26S). 7,167 samples displayed evidence for C. albicans (FIG. 7B). Likewise, among 173 vaginal metagenomes, the inventors found 22 samples with evidence for Kazachstania and Candida sequences, including presence of K. weizmannii (FIGS. 7C, and 13A). These samples had a wide range of biogeographical distribution (FIG. 13B). Collectively, the current data support the notion that Kazachstania spp. are a common and integral part of the human microbiome. The inventors corroborated this notion by an antigen-reactive T cell enrichment (ARTE) analysis of peripheral blood of a limited number of healthy individuals. As shown earlier (Bacher et al., 2019), ARTE revealed T cell reactivity directed against C. albicans extracts, but also against K. weizmannii (FIG. 7D). C. albicans-reactive T cells were polarized towards IL-17- and IL22-producing Th17 fates. In contrast, K. weizmannii-reactive T cells were of the Th1 type, like T cells which reacted to S. cerevisiae. Of note, CD154⁺ memory T cells responsive to Saccharomycetaceae extracts also expressed b7 integrin indicative of their generation in the gut mucosa.

[0174] In mice, abundance of C. albicans and K. weizmannii anti-correlated, suggesting that these yeasts compete for similar niches. To investigate the relative distribution of Candida and Kazachstania species in the human microbiome, the inventors performed a sensitive ITS2 analysis of fecal samples of a cohort of 570 healthy individuals (FIG. 7E). Since the Kazachstania genus had not been widely detected in prior ITS2 sequencing initiatives the inventors anticipated that it would be a less prevalent genus with lower abundance when compared with Candida and other prominent genera. Therefore, the inventors added empty control samples which underwent the same amplification and library preparation processes to enable the application of a novel ITS2 processing pipeline previously applied to analyze the low biomass environment of the tumor mycobiome. Indeed, 13 fungal species could be detected in control samples with read numbers ranging from 1-100 reads per species per sample. The inventors, therefore, applied an aggressive cutoff by flooring all species which obtained less than 100 reads in a given sample to zero in that sample. This process yielded 215 samples with ITS2 sequence evidence of either Candida or Kazachstania species.

[0175] C. albicans, was the most prominent Candida species found in 120 samples, followed by C. parapsilosis and C. tropicalis, with 29 and 15 samples respectively. Two Kazachstania species were detected across 37 samples prior to flooring, and were completely absent from negative control samples. Still, these species were floored in samples where they did not reach 100 reads leaving 12 samples with Kazachstania servazii and 3 samples with Kazachstania exigua, close relatives of the novel K. weizmannii species. The inventors did not detect K. weizmannii specifically in this limited cohort. Notably, the majority of individuals harboring Kazachstania species displayed mutual exclusive presence with Candida spp. (FIG. 7E) suggesting competitive fungal commensalism, as in mice. Collectively, these data identify Kazachstania spp. as part of the human microbiome and the current data suggest an inverse correlation of these fungi and Candida spp. warranting further studies on a larger scale.

[0176] Taken together the herein disclosed K. weizmannii is identified as an innocuous fungal commensal in men and mice. By its virtue to successfully compete with C. albicans in the murine gut for to-be-defined niches, K. weizmannii lowered the pathobiont burden and mitigated candidiasis development in immunosuppressed animals. This competitive fungal commensal is thus suggested as a potential therapeutic for the management of C. albicans-mediated diseases.

[0177] Although the invention has been described in conjunction with specific embodiments thereof, it is evident that many alternatives, modifications, and variations will be apparent to those skilled in the art. Accordingly, it is intended to embrace all such alternatives, modifications and variations that fall within the spirit and broad scope of the appended claims.

The application's sequence listing, which the Patent Office published only in electronic form, follows.

SEQUENCE LISTING (37 sequences)

SEQ ID NO: 1 - DNA, 971 bp, Kazachstania heterogenica
  source 1..971: mol_type = genomic DNA
tatatatatataatatatatatatatatataatattatatatatatattatattatatatatataatatatatataatatatatatataatatatatattatatatatatatataatatataatatatatatattatatatataatatatatataatatatataatataatatataatatattatatatatatattataatatataattatatattatattatataatatatatatatattatatatataatatatatatattatattatatatatatatataatatatctattatatatataaatatgaaatataatatataaacctattattataatataatttatattatatattatataatataatatataagtttattataattataatttatatattatatatacttatatattatattatataatatataatatatatattatatatatatatataatatatattatatattatatatataatatataatatattataatatataaattataattataataaatatatatattatattatataatatataatatatatatatattataataatagtttatatattatatattatatttcataatataacagagatatctatatgttatatattatatataatatgaaatatatatatataaaccatattataatatatatatatatatatatatatatatataagtttatatattatattatatattatataatacttatatattatattatataatatataatataaattatattatatatttattataatataatattatattatatattatataatataatatataagtttattataatatataaattataattataataaatcttatatattatattatataatatataatataaattatattataataataggtttatatattatatttcatatttcatatatataacagagatacccc

SEQ ID NO: 2 - DNA, 34643 bp, Kazachstania heterogenica
  source 1..34643: mol_type = genomic DNA
cttataaattatattatattgcaatataatatattttatatatattacatataattattattattatattatattatataatttcattataatatcatatatatataaatatatattaatattattaatcaataataaattatatatataataagatctattatatctataataatcaatatagtgaaatattagatattattttcttctactatattatatatatatataatagtatattaaaagaatatacaaagatacagggcccccacttataaagaagttattcgtggcaaggccccacttataaaggagtgaaaaaaaaaggggagtatataaagtatgcgaaagatatataaatatataatataatttaatatctcctatgtagatatctgtatatatatatagtctatatatacactttcccctacccacttcaatatattattattttatattatattattattataaatgaagcgaatattatataattattatatcattatatacattattacctaaataatataatatacattataatatatataatatattatatttaataaaaaattaaataatattatataatataatataatatagaacatattataaataataaactactcttaatatatataaaatactatatttacagggaccccccccttattagaatattggaatattggaatattggtatattggaagggggggggagtatatataatatataaattataattataataaacttatatattatattatataatatataatataaattatattataataataggtttatatattatatttcatatttcatatatataacagagatacccccctttttcagggggggggtatggaagtatatattatctagtaattaatataatcaataataaagattatattatatatattaaatatataataatatatctatgacaaggtatagatatattataactaatatatatataatatatatatataaatatatattaatactccccttcggggtggtcctagtatattaattatagttatattaatataatatagagataaagatattaataataatatataattttgatatctatatttataataaggatagtagtactatcatatactaaaaatattagtaatactccccttcggggaggggctcccttcggggagggactctgctatttcattagtggggagggacccgcaaagtgggcagggacccacaaagtgggagtataataatattaattaataaaattattaatataatatataaaaagaagaatattaataattattatatataaaaagatatatataaaatattaaaatattatatataatatatatatagactatatataatattatattattgttcatttaatcattctaagaatttaggtaaagatacggcttcaattttaataggtattaaagcgtgtccactaccacataattcactacacataccatagaatacaccttctctttggattaaggctgatacttgatttaatctaccaggagtagcatcaactttaatacctaaactaggaatagcaaaatcatgaataacatcagcagctagtactaagaatctaatatgagtatcaactggtacaacaattgatagatcagtatctaataatcttaattgtccttcttctaataaactatcaggaattacatatgattcaaattcaattgtttcaccactatcattaataaaatctgaatattcatattttcaatatcattgatatccaatagctttaattgttatagctggtgaaataacttcatcacataaatataataaaataaatgatggaaaagcaattgttaataatacaacagctggtaaaattgttcaaataatttcaattgtttgaccatgtttaatatatttatatgcaataggattttttgtatatgttcttagaatattaaataatattcatgatactaatcctaaaataattaataaataaaacataatattatcatgtaattctaaaataccttcttgatttggtgttgctgaatcttgaaaataatatccatatggtgttggcacatcattatataatgttgttataatattcataatacttaacattttttatctttttctttatatattcttaatattaatataatattaatttagtctaatttattaatgttatattaaggacttgaaccttaaatctttcgattacaaaacgaatgctatacccaattaagctaatataactatactctttatatatttattaatattatcaggcacccactagacggtagtataatttatattcttatatataaattaatccttactttttttaattaatttatatatttactacttataatattatatatcttattattatatataatattattttatattgatatttaatatatcttaataatatattttaccgctccctaccactaataacttatttataaatggcccccccccacctaagaatgatttttaaatatgatctttaaggatgaaagcaggcttcatatcaatatcttacctatcctatatattatccccctatatattttatttattatattatattatataattattatattttattcttatttataataagaaggaaaattaaataaggtatatttatatttatattaatatatattatatatttatatattattctcttaatagtctttactcccgcttttctccccccataattaataatattaattatgaaatcctatagaagtggaaaactctcttaacaatataagatcctattatattaattatatattatttaatctatagatatttatacttaataatattaagatatatatattatataatatatatattatatatatatatatgattaatatatatactcccacccacccgacaggggtgggtggggtccaccttattataacaggtacacggaaaaatattattagtcaaataatataataatattatatattaatagtttaattatatatataatttcccatatatataaatactctcttgttatataatattatatatatcatatatatataatcataatatattctatatattatatataatatatatatattagtataatatatatatatatatatatctcctccccatataaataataaacatattatattacaagaagggataatataattatatatactttatatatatttatatatatatatatatataaatattatatatatataatatttttttattatttatataattctttatttaaataatatttattattaattagaaaatctatattataatataatataatattataatataataagatataataaattttactctgaattataaccccctccctacccttaccatattaataatataggtttctattgggaagaataataagtcctgtaatatataatagatatatataatattatctctatgagactattcataataatatatatatatatatatataaaatagtaatatataatattatataatatattaaagggggagaatattaagatattagtataaccactcaccccccctttttcagggggggggtgagtgtagtgagtgacagtattataataattatatactctttatattataattatcataattatcaatatattatatattatataatattataataataataatattttaaatacaatctctatcgtaaaagattattgataataagatattatcatataatagatatatatatatataaaatataaatatattaagagggaatattattatttctgtggctataataatatatatatttataatatataatatataataaataaataatagattagatataaaggagataattgataaattagtaaattagttataattaagtaactaataactataataaattatagtatataattatcaatttaattatctaattaaaaatacttcatatttaatatgtattcaatatttattattaattaacttagcttaattacgataatataattaaaataataatgatattaataattacaccataggttaattcattatgatccttgcgtactaataatgagatttaatttgataaattaggtatagtagataaaaaccatactgattcacatcgtatttaacccaactcacgtaaccttttaattgacgaacagtcaaacccttcttagctgttacaaccaagaggataggttgagtcgacatcgaggtggcaaacataacttacaatatctactctttcgttatattaccctgttatccctagcgtaacttttattcgttatcaataatccttacaatcagtattatttgttcattataccatacttacgtacttgttctacccgtatgtattacaatcatagcatagttatactattatatttatttatattaatctttaattaatatcacccgcatacaaaaatatacaagcttttgttgattaattatattattttcttaataatttaactatacattatttattctattatatattgattatatatcaatatttttataattaatatatttatataatatattataatttatatataaaattaattttattatatatggactttatcagataaatttgctgaaaagaacatcccattcaaactaccaattagaacctgtttccattaatatgaattaaataaataattaatattaatatattattatggataagataaaattatataattaaaataagtatctcatattttatttaatcaattacttaatattctgaataaaattaataatcaatcaagttatctaattatagtaaagctgcatagggtctttttgtctaactataccaaaatcgcatcttcacgactaattcaatttcacttggcttaaggatgagacagttgttgtatcattacgtcattcatgcaggaccatatttagtggccaaggtatttcgctacattataaccctcaataataaggctgctatttatccatatttagtaatatactctctcaaatatattatttatataatgaacatggagcagagttcacaccttatactttaatttatcatttccgcaaagtgctgtgtttttattaaacagttgtacaaccttgttcttatttatcttatctaatcttagatctatatttgccgagttccttatccttaattatccaatacaccttcatattctctacttacatacctgagtcggtcttcattacggtatttattaatccttttcctgattaattttaatattatttttatttataatattattattaatgtttattattaatttagatttacccatctattatatctttagatatattatattaggggccgtacttttatagtaaaaccttatgctttaggtgaaaaagtttatacttttttaacgttactcatgtcagcattctctatttaattattattttatatattaattattaattaatatatatcctcattaaatgttctattaccatattattaattttattaataatatttagatattcagtttaatatttattaagatccgtatattatttattaacatatatatatatatattatattttaatatatatatgatttttaatatcatttatatatttttttatatcagtgcattgttacatgttcattaaaaaatggttattgtcaaacccattaactgattatattttaatattttaatatttttttcacttaatattaaattaggaactttatatcttaatctgggctgttcccctttcgattatttaccttatcgcacataatctgactctttactttatataatataatattttgagatttaatacttcccttagggaatttattattaataaataatctttatattaattgctataccatcctttaatatattatatatattatatatatatataatattatatattaaatattatatattataaaggctatacttacatatatttcatagaaaaccagctatctgcagatcagatttgtctttcacttacttaccttaattattcaaatgattttgctacatcaacttgttcgatcgtttatactcatcttattaaagtaagatcatctgctttcgggtctattaatatttactcctataattaatttttatattaatatttatattactttttattctctatttatatttaatgtccttatttcgcaattattaataacttgctgacccattatacaaaaggtacatcatctcattaatattttcatataatgatatgattgcttataaaataaccatttcatactttccctcacggtactctttaaacttattaatagtatttagccttagaatttgttaatccctttatatatatatattatatattatataatatatatattatatattcttatatttattttacataatacttataggctatattactttctctcaccaatactcataatatctctgttgatttattatccttaagttacttagatgtttcagttcacttagtatttatattttaataaatatattattatcactttttattaataataatattattatttattttttggtttcccttaggtattagaatcattattaattcattagtaacctatatctattaatagctttattatatttattatataataattttataatccatgattatctcttttaatcttctttataattatttcaaatctattatttattacttataatttattcattttattgattcaagaataaaaggattcgaacccttaatgattgatttgaaatcaatagttttaccattaaactatattcttattattatattaattaattaccttaatatcataccacttctaatattatgtagtataatattacaaataccccctttgttatagccccgagtctcactatatatattatattatattttatagggtaaatactaagaatcgaacttagatatagtataccacaaatactctttctaccattgaaatatatttacctatatttatttatattttatttatattatattaaatatattttatattttttatatatcaataatattattatatatattatatatataatatttttattatatttttagattatcggaaaatatgggattcgaacccatcagaatattaattcaattacttagcaaataatctacctttcctatggtgaattttccatattatatcttacctatccttattaatatttttaatattcttatacgaatctgatcagatttgcactgacatccttcattatgacaaaatgatactctactattaagctacagatcctattttataatatcatattatatcagtacctccaccctccacctgatatacttacttttatttaatattattattatattattattatattattaattataatacacatatattagtatattccctcccccccccctataatattatattatatctttatattatatcctctcataatataatatatattatatatatatatcatatatattattaataatatatatattattcactatcataataatttatatataataggaatattactatattattatattatataatataatattataatataatatttacttatttcctattttatactaatatatatatattagtatatatagatagttatatatttttatataaatatatatatatttatatatatatataatattatatatattattagagcacccgcttatcccatatttaattataataaggcttatatcgaaacaggtatatattatatatatatcttattatatacatatatatcatattattaaaatatacttaaatattatatatatttatattatatcctatattataatacatatatattatatatatataagatctttatgtaatagggatccacaaaatggacagggaaaatatattattaattattcattaattaatttattatacggtaataatgataatattattatatacaggaacccacatacaaagtacgcaggagatattatattattatataatatatattaatatataatagtttatatagatccgcccctttataaagtatttagaatagcatctactttattttgataggggcggaactagatataattaattataccctcatatattaatacctattattaatattattatcctataatataatatatatattattatatatcagattaatatatatactccccccccccccttccaatattctaatatcccaatattccaatattccaataagggggggggtccctgataatataaagaaatagattatatttaatatcagataaggtatattatatatatatattagtacttaatattattcatatattataatatatattataatatataatgaatatatatataataaaaatattatgatattatatttataataaataatataaatttattatttatttaattagggtagggatccgcaaatgatatagcggatagggacccgcaatgatatagcgggagggtaaaatatcagataggatagaatcgaactaactagatctttcacccaaagaaagcgcctgaccatttggcttctatctgaataatatcaaatatatgatatttaatatttaaatatataaacatatttttgtattatatataactattatatattaatatatatattattatatatatattatatattatgattattattaataataatatatattattcttttcaaataattattaatattataatttatatattattattattatgattttccttaataatttttatatattatatttttatataatatattatattatatatcctataattaaatattatattatatcatataatgatatattatatgagtaataatacgatttgaacgtatataattaggtcatgaacctaatatgttaaccaattacatcatattacatatatattttattattcatatattttataccttatatttttatataatatatatatatatattatttatattacttataatataattataataatataatatgaaaaatattaatatataatatatatatattatactcccctcccactcatattatctttataataatatattagattatattttatataatattatatattaatttataatcatatattatatatatatatattatatattataatatataataacagggacccgccttttcaaagcgggagagacagggagatattataattattttagggatctatatatgcaagaggtattatgaatataaatattatatacttaatatataatatttaagtattaccttattctttatatataaatttatatagtagattctaatatacttactactataatatatatatatattattatataatatataaatatatatatatctgatatatatccctgttataaaaaagtatctactactactatattattatatataatatataggaaatatattatatattatattattatataatataataataatataataataaatataaaatatagatattattatattataatataccatattaatagggataataatagtaagttcccttttagagggaaaatatatattatatctctataatatagattatttaatctataatatataatctcccgccttttcaagtcgggtccctgattatatataatctcctgctatgcaggtccctgtccactatgcgggtccctgcccgctatttcattacattccattatattgtaattacattttattacatttcatttacggatccttgattatataatttctatatatctattaatatattatatatattttatgatatatatagcaggacccctccccatttttggggtggaggcaagtatattctctatattatattatctattatctattgtctataatctatatatttataataatattattcataatataattatatataatagataatattctaatatattaaatatgtaataataataataatattatatatagagaaattatatatatatatatataaatactccccccccccctcccttcgggtgggggggtccctgtatattataatatataatataatataattatatattgataatatatatattatgatataatataatatattttatatcataaatatcttaataaagattaatatttattaaggaatataatatggtataatatattctattatataaatatatataatatatatataaaatatatatctaatatatataagataattgatatattattataaagtataatatgacatattatataatatataacagggacccgcaatgatatagtgggagggcaggggagtatattaatatattatatagtattatactataaatgagtggtaaattaatatttattatattattacttaataattattatattataatataatataatataatataatataatatagattataatattatactataatagggacctgcgaagcgggcagggacccgcttcgcgggaggaaaaaatatatataatatatattaatatatatatatatatattaatattaatacataagaatattgtataatataataataatatgatatatattatatattataaaagatatatataatatatacaataaattaatatataatatatagggggccgctatttctacatcaaagcggggagggacccgcaatgatatagcggacagggacccgcatatgatatagcggacagggacccgcatatgatatagcgggagggggtcgccatttaattacatttcattatatttaattacatttcattagcgggtccctgataatataatatatagattatatatatttaatatatatattcagtatatatttaataaatatataatataatataatataatatattatttatataataataaatattatataataataaatttataaagtgagagagactataataataatataatctattaggtgtttatataataataatatataatattattatatatattatatatataatacttataaatatctattattaatattattatgagaataatatattaattatagttaataaggaggaataataattaatataatatatattatatttatatataatttatatattattatataatatgataatataataataataatatgatatatataattctatattatatatataataatatatatatatggacccgttttttaaggcgggcagggtagggggggggaataagaatattaattataaattatttattaaaattaccgatatagaataaaatattttcaatatatgagataataggaacaaagattaagaagtaagcgaagtataagaatgtagcgatttgtcccatttgaacgaatggtacttcaacatggcaagagcctaatacacctaataaaatgaaattaaatacgaataagaagaagaataatttagagataattttaaaagtattacctctaataacacttctatcagttaaaggtaaaactaataaaactaagatagcgccaaacattagaataacacctaataatttatcagggattgatcttaaaatagcatagaatggtaataaatatcattcaggaacaatagaagctggtgttactattggattaccagggatataattatcaggatgacctaatgtattaggtgaatagaatacaaataatgaaaagataattaaaaatacaaatacagtaattaaatctttaaaaataaaatatccatgcataggtaatctatctaagttaccagtaatacctaatggattagatgaaccatgaacatgtaaagctattaaatgcataataactaatgcagcaataacaaaagggactaaataatgtaaagcaaagaatctttggattagaggattagatactgaaaaaccacctcataatcattcaacaatatctttaccaacaaatgggatagctgaaaataaattagtaataacaagagcacctcaatgtgacatttgtccatatacacaacaataacctaagaaagctgctgctatagtagctacaaagataattactccaataattcatgttaatgttctaggtgatctatatgatccataatataatcctttagctatatgcatatacatacaagcaaaaaaaaatgatgcaccattagcatgacaatatcttaaaattcaaccaccttgaacatctctcataatatgttctactgatgaaaatgctaactcaatatttgatgaataatgcattgctataaaaatacctgttaaaatttgaattactaaacataaccctaataatgaccctaaatttcatcaataattaattgatgatggctgtggtgaatcaattaaataactattcactatatttaaatatacatttgattttctaaatgtcataaccttatctttatattatatatatatatatatatctttatatcatatatattatatatatctatacttaatataccctttttattaattatatatcatatttaatatatatatcttatctatatatatattatccacttacctcctccttaagaggaggtccttattatatttattataatataatatattatattatattataccttattatatttaatataattatattaatatatttattatattataatatatatattatattttatattatactgccctgccctctattataaggttcttctccccccccctttttatatgataaagtagtagtattatatattttatatatatatattatatattatattatattatataacatattattatattatataacatattattatattatataatattatttataataaatatttatatatattatttatatattccgtataacgggtatttataataatatttattattaatttataattatatttatatttattaaatataattatcggtctttattaatcttaatcggattcgaaccgatattttcaacatgaagaggtgatgtcgtaaccattagacgataagatcttattatagataatataatattatatatatatattatatatatatatatatatacttcaaaaaaaaaacagataatattattatctttattatataataatatatataattatttattatatcactttcttttataaatattatattatataatagaataatccttccgggccctcccgcgtactttgttcgcgggccccctgatatatatatataattatattatatataatattatacttcaatatatactaatattatgatataataatataatattatattatattatattatatataataatatataattaaatagtatattatatatatatagatattatatataatataccccctaccgggggtatgtaggaagtaataatattcattataatattaaatgtatggattattaaatccagaaaagattatacgttcgtatcttatattattatattttataataatatatattatataatatatgtgagatatcgaatacctaggttgatattctatactatccaattaatattaatctgtggtatattagattcaataaatacctttaatataaatattatactatccataatatatatttaataatatatgatataattacattatatactattctcccgctttgaaaaggcgggtccctccccgcaaatgatatggcgggttcctccctgctttgatgtagaaattgcaggtccatccccacacataaaacatgaaagagtagatcccatgatgagaggaaatatataaacatatatattaaggatatatacagggagatatattattattaataatgttaatatattatattatataatattatataattatatttataataataatagcgatatactgctttattctctttttaatattattattattaataataggataggaatatatctattattagatataccaccacatacggtaagagtaataacatataacttataatattggacggtagtaaaatatataataattatattatatataatatttactatattatttataataataaatattattatcctatataaaatatgtaaatatctcccccccttccaatattctaatatcccaatattccaatattccaataagggggggggtccctgataatatatatgttgaatatattttatttattatttaataataataataatattatataatatttattatattataatatatatataagattataatattatatattatatataatatctctcatatattataatacctttttataaccccctgaaaaagggggggtatataatataatagattatatatatatattatatatatataatatatataataatattatacagggagatatattatatattctccccacccttttcaagggtgggggggggggtgaggtatagtgggatacataatttatatattatgatatatgatatttatatataaatataaattatattaatattatattattattaataatataatatatatatttaagtataaataaatgaatgataatatgagagataagattaagagtatataataaaagaatattaatagatattatataatataatatatatattaatataaatattaatgattatataataattaatgtaagtataaagcatcttttaagtaagaagcggttaagatacttcaaacataactttgaattaaaccaatagcgatttctaagaagaagatagctaagatagctaataaagggatagagcctaaaaataaagtaattaagctaatagacataaaattaaataataatccacttaaaatacttaataataaatgtccagcgcagattattaacacttaatcttaaacctaatgaaacagctctagctatatatgataatatttcaattataactaataatggtactaatactaatggtgtattatgagggataaataatgaaaagaaaactaaaccatgtttatataatcctaaaatagttataccaaatcatacagttatacttaatgctataataaacataaagttagatgttaatgagaaagtataaggaattaaacttaataaattagctaacataataaatacaaagaatgtataaattaaaggaaaatataacataccttgattactttttgatatatcactttgtactatattttttattatatttataatagtatcataaataatttcattaaatactattcatttattaccaataatattattattaggtaataaatataaaaataatacaacaattaataaaattatactaaaaatagtaaatgttgtaatatttaaattacttaaattcattaatggtagttgaaatcctattactagctgaatctcaaattgatctaatggtgaattaataaatgttctcatattattctataataatttttatatatcctataaatatatatatatatatataatatatataatatataatatataatattatattgatatatatctacctggtcctgtaaggaactggatatggaatatgttataaatataacataatactcccataccctcccgcaatatcatttgcgggtccctgcccgcaaatgatattgcgggtccctatataatattatatataatataataatatatataatattttattaaaatattaatatgtacccggtcttatgaaagaatccagatataaagtattatatatatataatatatatacaatataatatattaatatatattattatattgaaatattaatatatacccggccttcctgaaaggaggccggatatgatatattatataaaaataatataatattatttaacataatataatataatatataatatataattattattatatttattattataataatattatcaggaataatactccaataaggagggcagtataatatatatatatatatatattaatttatatatatatccacttgtggatacctatcaccacccccactcatattaatatattaataaataggtactcccttcaatacaggaacctatttataactcagtggtaggaggagcagtatattaataatataaagagcggaggatggcagacccagtaatatataattattattaataatatttaatattatttaaatataaataaatattttatttataataattatatataatatatataaatattaataaatctaaataatatatagattatatagtaaatatattactttccttttatacgatgataacaatactaggtaggaaaagtaatataaaatggtatattattcattataatttagtaataaataatctagatacatataatttcataattattggtaataaaattagtgaaaataatactaataatacaacaaataataaaaatccatatgttaattgattcataaaataaaatggaattaattgtggcatatcctattgtcatttatttattatgatattcttcaacactataatatatatagtagattaatatcaatttaatataaataaaaacatatatatatcaatatatatattatatcatataataaattatatatctatactccgcccccccccttttttacaggaacccatttataactctgtggcagggggacggaccccttatttatattatataaataataatattataatattaatatgatatatattaataatataatatctaccagactaacccccctctagagtatattatgatatactatgatatattatgatatactatgatatattagagagaggggggggggtgatagacaataatattatattgttagatatattatataatattattaaatattataggaagattattaatatataatctatataatgatattattatgataaataatatatatatatgagatatagtgtatattataatatcctgttttatatatttataatattatattaatatattaaagatataatatctccctgttattatgatataataataatatatatgaaaaattataataatatagtaaactatatatatatatagtatataaaaatatatataatatatatatattatatagtaataatataataataaaagaatattaataatattaagattgaacggcaggagtattaaaagcatgaacagcagggggtgaatttaataagaattcaatagaagaagatttaataacattaaatttaaagattctattagattctataaagtcaggagttttataaattaatttatgagtgtttctattagtaataccatttactaattgatcatatataatataaataaataagaataatgaagctatagcgataatagaaccaatagaagaaacataatttcaaccagcaaaagcatcaggataatcagggattcttctaggcataccatttacacctaagaaatgcataggtaagaatacgatattagcaccaataaagattaatcagaattgaatttgtgctaatttttcattataatctaaacctaacatttgtgggcttcaataataataaccagcgaataatgagaaaatagctcctattgataatacataatggaaatgtgctacaacataatatgtatcatggaatgctacatctaatgatgcattagctaaagctacacctgttataccaccaatagtgaataaaaataagaatgcaatagcaaacattataggtacagctaatctaattgatccaccataaattagagctaatcaactaaaaattttaataccagtaggaatagcaataattattgttgctgatgtgaaataagctctagtatcagcatctaaaccaacaatatacatatgatgtgatcatactaagaatcctaataaaccaattgatgctatagcatatactattgaaatttcaccaaatactggttttttagaatatgttgatacaatatgtgaaataataccaaatcctggaataattaaaatatatacttcaggatgtccaaagaatcaaaaagcatgttgataaaaaattggatctcctccaccagctacctcaaagaatgaagtattaaagtttctatccattaataacattgttacacctgctgataatactggtaatgataataataataaaaatgctgtaataaaaatagctcatacaaataatggtattttatgcattgacataccatttgttcttatatttaatgttgttacaataaaattaatagcccctaataatgatgaaattgatgttatatgtaatgcaaaaatagctaaatcaacactaggccctgaatgagcttgaattgaagctaaaggtggataaactgttcaacctgtacccgcccctgattctactaatgttgatagtactaaacatactaatgctatcggtaataatcaaaaaccaattgaattaattcttggaaatgatatatctgtcgctccaattattaatggtaacatataattaccaaaaccaccaattaatgctggcatcgctaaaaaaaaaatcattaatacagcatgacctactactaatacattaaataattgattattaccatgtaaatattgtgatcctggcgctgctaattccattctaataattattgacatagctgatcctgctataccactaaataatgctaaaataaaatacataattgaaatatctttagcatttgttgaatataatcatctttgtaccactttttatatcctattaattatatatctttaacatatatatttatatattattccctaccccccccccacctaggaagtacacggaatcctatataatatatatttttatataccctgtcctatcatataatatctttactataatagttgatatatatatatatatattatatatatatattatatatatttattttattaatttatatattattactttattattatttttattataatgtactctctttatttattataataatatatattatctcattattatatatatatatatatttatataaatatatatctttacactatatgaaaatatatattattatttattattattaaatatattaataataatatctctaataaagaatagaaatattacttatatagtaatatataatatattaccccccaccctacccagtagaaagctatatggtagtatagtatttaaatccttatgaatttatcccatatctcacatattatatatattatcatatataatatatacagggatccgtgatacggaagataatataaaatcttatcccctccccatatatatatatgtatatatatatactatcaatattatatcagggacctgtgatacggaagataatatatgatttgatattcatataatatatagatattaacgatattatacttcccacaccctcctcctaggggtgtgggagtgtaggactcacatattaccttatggtaggtaattgatataccatatattatttatataaatatatatcgaatagtataaatatcaaatatatcctttatatatattctccaggagaacctatacaggttactgttatattatattttttatattttaatatatataaattatccattatacgagtatatatattatatataatataatatgatatattgttattatactataccgcccccccccttctcctacgaataacttctttataagtggggccttgccacgaataacttctttataagtggggccttgtaatagagggggcgggtatgatgtataatcatcttaaatatactctcataatatatatacctaatatatttatatatataaatatatattccctaatatatatatatattatatatataatatagtatagtatattaatcattattttatgataatatattatatatatataacttaccacacccccctcgtagatcatagatcatagatcatagagggggagtgtggaagtataaaataataatcttatcttagattatcttatcttatctaatctttattaaagattaatatatataatatatattatatatatatacatataatataaaattatagaatatctcactatatgaatccctatatatttaaaatatttcttaaggagaactcaatatattattattaatatattatagattttataaaattaaaacctagggtatatacctaaatccgatatactactccccccccctcatagatcatagatcatagatcatagatcatagaggggggggtataatattaatattaatcggatagtgtagatctcaaatatactttatatatatatttgagaaatatatatatcttattatataattatttatatagattatataatctataatttatacctaggattatcctaggtggatatactatatatttaatataataatttaatataaattaaatgatatagatttgaaccttttattaagtaattaatatactatatatttaatataataattaaatataaattggagaatgtaggattcgacataccatatttttaatattaaatatattaatatataccagatagtgtagtatttgagcactaggatcttccctgtattcgatataccacacgaataatataaattggatagtgtaggtttcaaacctaggatcttccctgggttcaatattccacacatttaatattaaatattaatataaatcggatagtgtaggattcgaacctacgtagttaaatataactaatgatagctcaaatatcacactttaaaccactcagtcaactaacctatattaatatatataacaatatatatattataattataataattatcaatatattatatattattatgaaactaacaagaatcgaacttgtattggtaccttatcaaaatactattctaacctattgaattatagtttcaatatctttaatataataatatctcccgctttgaaaaggcgggtccctatatcattacatttaattacatttaattacatttcattagcgggtccctgttataatatattatatataatatttttatatattatattatattatattataatatatatattattattattatatatatatatatatataatatattggagttaatgagatttgaactcatatctattgtatgcaacacaataattctaccaaattaaaatataaccccttaaagatataatatatatatattagtttttaataggaattgaacctatataatctcattaacagtgagatgctttaacctttaagctataaaaacattataattatatattattattatatatataatttgatattatttatatgataataattatatttaacctttccatatatatattattatatactttctttatatataaaatatatggaatggtaattatataatatatgaaagggataggaatcgaacctatgaaggtatataaccattgagtttacagctcaactccaactaccaacattgaaaacccttcctatataaatatatatatttattatataaattataatacttacttttatctattaatataatattacatttacttataatattataatataatattattataagtaataataatttatatgatataataattaatattatagcttttatagcttagtggtaaagcaataaactgaagatttatatacatgtggttcgattccctttaaaagcatattatatatatgtaaatactaagattcgaacttagataatatgcccctaaaaacatacattctacctattaaattatatttacattatttaacttacttttatatatatatatatatatttatattatatattatatatatatatatctactatattaatataataaatatattcatataagtatcccccccccgcctgtaaggcggggtattaattattataataatatcccatattataccctgtccgctatacaggtccctataatattattattatattatctgttgtaataatattattatggaggtgttgtttaacggttaaactattagattgcagatctacataataagagttcgattctcttcatctctttaatataagatataaattatatattatttattaaataaatatttaatatatatatatatatattctttttatttacctccccccctaaaaggggtccctgtcatataaatatattatatttatatattaattatatatattaatatatatatatgaagtatattattatataatatcagggagataatatcttccctctgttagaaggaaaatataaatatatattcatttatatattatatatataccctttttatatttctattataatattatatatattattatgtataatataatatacatattatgaatagttactaatatattagttagaatgaaatacataacttattaatatcagaaataccttcgtataggtaaaatatatatttacctcccgctatatcatatgcgggtccctgtccgctatatcatttgcgggagatattattattattgttagataataatctaatatactcctccccccccctctacaagactacaagactacaagaggggggggggattataggggggggagtatataatattatatactaatagataatcagaatatataatttatatttatataatatataaatactgccctgccccagtatattatatatcataatatgataattaatattatataataatattattatataatataataataatatagaatatgatataataatattatatccactatatttatatttactatattattagggatccactccgtgggagaatattatatataacagagatataattatattatatgtaatatgtataatacatatattatatataataaagatcaatattattgattactattttccgtcatatataataaattatattatataatatacataataataatatataatatatatatattatattgtactcattataatatatatctacaatataaatactcccacttcgggtggggggaatccctgtatattatataacagaggtataattatattatatatatgagagataatatatatatatatagagatatataatatatatcataaatattgataatattattaatatggtatagatatagatatagatatagatatattatgtatttccttgccgcatagcggcagggaagatgtatatatgatattagagttaatataatatattattagggtaatacatttaatatttatatatacaaagattatatatatatctattatatctcccaggtactttgtatgcggattcctgatattataaatataatatttatatattatatttgtgtataatatataaatatataaaataataggggaaataattaatatttacatattatggatatcatataattatattatatatatagatatttattataggggggaggctattatataatatatataaatattaaatatatatattaaatatatatataacccatttcctgtaggggatgggggggtgggtaatagatattaagtaatattatatttatataatatttatataatatttatataatatttatataataatatataatataataaaaaataaaaaaaatattatatatatattttgtatattgggtttattatataaagaataataataataatgtatatagaatattaattatatataactatgggtgttttaatatattaaactagagctcatcaatagaagcaaatatataagaataatcagataacatctaagacatggcaatataaaacggtagtttcatatccgacatgatgattagaagttaaatgatagtttcttattcttcaatagcaaatacctaacataataattaacataaccatatgtaagaaatgtaatccagtaccagcatagaaaactgaaccatatacaccatcagtaatagtaaatgtagcattagtatattcaatatattgacaagctacaaaaataacaattaatcagaatgtaattaataatcctgataatgctttacttctatctctattaattaatgcatgatgactatatgtaatagtagcacctgatgataataaaataatagtatttaataatggtaattcagttggtttaatagcttcaattcctactggtggtcaacaactacctaatagaatatcaggacttatagctatatgaaaataagctcaaaataatccagcaaaaattaatacttctgataatacaaataataaaaatcctatattaataccttttctaacagctatagtatgattacctaaatatgttgcttcagcaataatatctctaaatcaaaaacatgcactacatgttaatacaaataatgataaatatactaaatttatattaccaatatatccatgcattgttaatcctaatgataatgctaatgataataatgataatgatactattaatggtcatggtgatggtattactatatgaaatggatataattgatgtctacttctttctaaatgtgtcattctttttatttattattccccttttatctttaatatatatatatatatatactcactcatatcttttattagataataataagatccttattatataatatatttatttatttattattatatttattattattctttttgtattatattatatttattattatattaatattttatacaaaaatgatagaaaatataggattcgaacctataatctttcgtgtgtaaaacgaatgctatacccaattaagctaattctctattttttatttttttatatatataattatatattattatatattttataattatattattaattatattatttacttataagattaattaccatattatataccttttatatttataatatctatattatatcctattaatatatatgaatattttatatatctccctacctataatatatattttttatatattatataataatatattataattatatataataattatattatataatacccgcatacttcatacacaggaccctatatatatatatatattatatataatacctatatactcctttatatcttataatatccattatctctcccgctaatgaaatgtaattaaatataatgaaatatattgaaatataatgaaatgtaattaaatataatgaaatatattgaaatataatgaaatgtaattaaatataatgaaatgtaattaaatataatgaaatgtaatgaaatgtaattaaatggcgaccccctgtatatacctttatattatatcatatattttacatattatattattattaaaatataataccccccaatatacctttatattatataatgatatatacctttatattatattatattatattatatattatatattatatatatattatatatctccctgtatatattatataatattatatagtatcatcctttcagatggagtagtataatatatacaccttatacaatcttattcatattattatttaatataatacattaatatatatattattattatattataaatatacaaataaattatattttactccattggaccatttaatcatctactactatattatacgtagattaaaagaataattatactattggaaaagtaatatatatatctcatatatattaatattattaataatatacaggatccccccttatttaaatttaaatcccaaggcggacaaagagatatatatttaatataatatatctccctgccgctatatcatttacgggtccctgttatattatattatattttataatatattatataatataatatttcattatatattataatatattatctgataatacttccactacatggtattatgatattaatattatattattaataataatatatctccctgttagtatgaatatataaataaactaaaagtataatattattattttataaataatggaagagaggaaaaaaaatacttaatatatataccatatatattatatataaaaatatatcctctatattatataaatattaatatttatatttgatatatatatatcttcttatatacctccttatataatatactcccccttgaaaaaagggggggtccttgtatatatatattgtatatatattattattaatatattatatatatatttttttatctattatatattattatatattatatataatataataatctttaatatattatatatattatatagagaatatatatatatatataagatttatctaatatttcctcccactattataggcctataattaataatgggaggactatctaatatatatatataatacctttttaataatatcaggaacccgtataggcgggtgattattatattatacatattatactccattatattatatatttcaataatatactctctttatctatatattatatatatatatactgattatatattaatctatatatattatggtctaagttatactacttcccccccccgcgtatgaaatatataatataatatatgaaatatataatataatatatgaaatattatatagtggggggggatattaagtaatataatatacttatactatcactaaatttaatatttattatataatattataaattatataatatatttcctgcctgcgtagcggaagatatatatattcttaatattataatatatatataatattatatgataataataggggcccgcctattcaaggcgggagggaatattaatatttatattattatataataatataataattatattattaaggacctgtgtattttttacgcgggagataataataaacagggacccttttttattggaggattgaaatattggaaggggtgagtatataaatatattatgagtgggattagataataaatttatatgagtgatataaaaatataaatataaatataatataatgttaataattaaattaattattataatttaatttaactttaatattatatttaccatctttattaatatttaaatttaatggattaatatgaccattatataaattattagggatataatttaatttatatgatttatttatattattaaatgaaccatatattaaatttaatgtttttgatctaccatctgataatttaccttttaatataattgatcatccatttaaatatttaatattattgttcttccctgtaatatttaagggtataatattattaaatatattaatataattatttataattttatcaatatttatattattattattatttaataaatatataatatattcattaaaaatattatgatccatatatacatatgataattgaactggtttaataataatctttttattataataatatgataatatattacttaatttatttattatattattaattattatgttaatcttattattatctattggtatataataataatatttaataataatagtattaatattatgcttaaataatggtttactaataaataatttattaccattaatcatatttattattctatataataattgaataattatattattattaataatattattaatctcattattcttattataattatatataattatatttcattgattattattatttaattcttttatacctaatatattattatcccttgtaattattaatatttttattaataaattatctttatttgatttatttaataatttaattaaatttattttcatttatttttattatatttaatattattatatattctcctttttaatattatatatactataatacatattattatatacaatatataatatattatactatactattaggaaccccctgctaaaactgtgggctgggtcacatataatataatattaattaaagagatatatattatatatataactattctaccttatatataattatattattatatattattatatatgcaagaagcagatccgctatatattacacggctacctatttgaatatttatgatatattaatatatatattaatagatgatattttatacttgtagaaggaattgaacctatcattatttatttatgagacaaatgttttaaaccattaaactatacaagtttattatattattattattatattttataattaatatatatatatatatatattattaccctatataataatccttatattaatatatatataatccttataatatgatattattatataattatatccccccccctgaaaaaaggggggggtgtatataacattatacctcctatctctcaatatatatactatatatatccatattatatattatttttataatatatttatatgaatattatatttataataatatttatatattatatataaataatatgctttccccctccaaaggagggggggggtgctattatataataatatttattatatataatacttactcattatataaatttataataaagaatattatataataatatataataatattatatgataatatatattatattatgtattctccctccgaagggggagggagatatttatattattataatgggtataaatgatatagaatataaaagatattaataagcccactgcaggttcccctacagtaactgtatttcaacttcacattaattaatatattttcatataataatatatataatatttatatattacaagaactctcttcctcttattgggagattatataaataatatatataataaaaaaatatatatatataatatagagatatttatttaagaataaataaataatatattatgatatatatataatatattaataagataaatatatatttcaatgtgtgatgagtaattagtgcgaaacagttagagtattcaccgtaacataattatttacgtattactagtaattcttttttcatattatcaaattacagataataattcatattattaatataatataaaattatattaaagattaatttgttttatattattaatttaattattttttatataatattattataattttattctcaaattattatagcatgtttatagcccatattatataggtcattatgatttgtcttaattcctattaattatattaattaataatataataatatatataatttattatatatatatggagttttgttcattaatgaacttaatctaaaactttgcagcatgaactaaagacaacaatgtaacacttgtaattatattattatatactcctcccttccaataagggaggggtctttatataatataaatattcaaaatatggtaagattatcgaggattatcgaattaaattacgtgctccactacttaagtctgtaaccgtctattgtcttgagtttcattattgctaatatactcttcaggtggaatactttaattttcattttattttataatatattatataaaatatgtattcatcgtttacaactaaaactacacaggtatcgaatctgctttgctactttagttttcatttctcaatgtcagttaattattaattaatattttcattattaccagtcttataattattattattatttcatccttactattataattctttaattatattttaattaactctaaatattattatttataatattcattctacaaatcctttaaaccattatgattaacgttagccttcattgtataaccgcaactgctggcacaattatttgttaagactattctatattattattatttaatatatattatatatattatatataataatactttattatttataaagtaattaatatcattatttttattatatatggattttattttttatcaatattattcatcctaataagtaactaaatcaatctttcgatcattgtttaatattccccactgctgtatcttatagatattgattatatcattaatcaatgtgatcgttctaactctcattaccgattatagatcgttggctaggcttacctcttaataatcctactaccttaaactattataggcttgactataaacaattattattctttaataatctttatatatatttttataaatatatcttattatacatttaatataatttatagttcattattcctatctattactcacttcttcaccacttatttattatctttttaataataaacgtttgattcacatgtgtaatgtccttatttaacgtttaatctgaaccaacatcatgttctttatattattcctttattaacctataataaatatatatatatctttttttattaatatttttattaattattatataatatatatttatttattacttatatattattatatatatattatattaatattatattattttatattatatcatattatattatatatattattatatattatattatatttataatataatatttataccattccatagcccaccctgaatataattaatattatatttaatatattaatattatatattgattaatatgcaccctcccccccttacatattaccgtattctatctatattattattataagtattcacttccttagaggaaaaggatacttaaagcatattattattattaatattattaattattaaatattataattctctattaaaatatatatatactcccccccccttccaatattctaatatttcaatattccaatattccaataagggggggggtataatattatattctaatataatatgaaatatataatatgaaatattattaattagtctctcagcccgcccctttttatagtaagggttatatttattaaaatagtatggggtgggtttataatcatacagggacccgctatgcgggagggacccgcatagcgggaaatattattatattcactattattattattatatcataatacccctcctactaattattagaaatctgatattattataataaaggtgggaaaatatattaatttcatattatttacctctactatataataattcatattatatatatatataagattatattatatataataactttctcctgcaaaacggaaagaaataatattattattatctatataatatatatatacttacctaacctcccccctccatattggagggggggattggaggaaaataataataccattcttaatataattattatatatttttaatataaatattatattattattattattatattaatataatatagatatatttatatatattattatatatatataattatatatataattattatatatatatataataatttatatttgtctaatatatattattatataatattattaatatcattaatattaatatgatatatttcagggatatatataatattcttcaatattatatcattattatagatgtgatagggggaaatatatttaaaaaggtcttatatcctgttatatcatatcttatatttaatatatcatatattatatgtagggacccgcaaatgatatagcgggcagggacccgccttttcaaagcgggagggcaggtaaggaatgtatagtaaaacatctacttcctaatataagataccttataataatatatattataactctttatataataaatatattatataatatataataatatataattattaatatgatataatcattattatgttaataataatccttttctattagaagaaggtttatatacaaataataagacattctcgtttcctgagaacccatattatgatataaatatctaatattaattattattatagtttaaagaattaatatatatatatatattatataataatattatattatattatattataatataataatatatataatatatggtatattattattataataataggaatattaataatatatatattatttaattaagttaataattaaacagcgaataataaaatgaatgaaatcattaaacagaataatcctagagcttcacttaaagccatacctaatacacaatatccaaataagtcttttttcaatgaaggatttctacttactccgttaattaaggcagcgaatacaatcgcaataccaattcctgctcctaataatccaattagagcaatacccgctccaatatatttagctgctaatactaattgcatatctttatctttatatagtatttaactatacccctttatatattatatattatatatatataattataatttaatcattattttaatatatgataatttatatatttatattatcattagatatattaatatatcattactactctttataaacaataagtaattttaatagaaaatatattatatatttctcttatatattatattatatataataatatatataatatattactaataatataagatatattatatatcttcttattatttataatatataaattatattaacattttattaaatataatatatattatatataccatagtatatagctccccccctctacaaaaagagggtctatattataacagaaacccacctaccaaagataggaatatatcaatatataatatatgatatatatatatattattaataatataatatattattatatataatatattattttaatatatataaaaagaatatatatatactctcctccccccccccttccaatattctaatatttcaatattccaataaggggggggaatctttaattatagatagtgagacttgaactcacaataaatgtgtggaagacaattagtttaccaattaacttatatctattataacaaagataataatatattattattacttttataattacccatttctcccccccccctataatccccctactatattatatttcataatatgaatctatatagggactctcaaggcggggggggggggtatatatttaatatatataatgggtatatatatatttaaaatataaatataaatatatactttcttcatgattcgaacatgaaatattaatattagaagtattatgctttaaccattaagctaagaaagtattaataatatatgtatattatttgagaatagttggaatcgaaccaaacatgagctgcttaaaagacaactgttttaccgttaaacaatattcccactatattctcccacctagaaatagcgacccctgataatataatatattattattgaatcggtttgattcgaacaaacaataaccaaactcaaattttggtaacttacctattagttcacgactcaattattatattatttttatttattattatattaataatatcctttatattattattattcttttatttatattaattaatattaaatctcacataataatatatattatattattctcccctccggggaccctacctgacccctatttcattacatttcattacatttcattacatttcattacatttcattacatttaattacatttcattacatttaattacatttcattacatttcattagcaggtgtctatatataatatatttattatattatatgttatatatatattatatatattatatatatgctatttaaaggacttgaacctttatacattaaagtaatacatcttaagagtatcgtgtctaccatttccaccaaaatagctatttataccccctcccctcgtagatcatagatcatagatcatagatcatagatcatagatcatagataatagagggggtaccttataataatattatattatattatctcactgcccgccatttcattacatttaattacatttcattacatttcattagcgggtgtctatatataatttactta

SEQ ID NO: 3 - DNA, 4894 bp, Kazachstania heterogenica
  source 1..4894: mol_type = genomic DNA
ggatatgttataatattgttatcctctggatgaataatattagtatacatgtctttagtgtcggtgatcatactatatgttattattgtgtattattattatgttgatatgtagaatagtttttcctcgatcttttgattcggaattaataattatataaatataaaagaaacatatgacaaagtgtatataacttattcatccagattgaaaaattaataagtaaagtcgtctacttatatatgtttaccttttggcaatttttcagaatatattaatttattttgattctgtttgatcttatctccataacgttgaatgtgcaaaacaaacatttttcctctttgatacatttacatgttactcaaaccggtaatatatcaatacagcagtttcatcatacaatttagatgctgatagtatggtgatttgttcctgaggaacataatatgtttgaagcagtaccacattttctttatttttcttaattggtagaaatcctgatcccacaatagttaaatcttcctttgacccaattcctccatatttaggtgcattcttaattgtatggtaattctttagccaatttcttttatttgttatatgaattggtgatccagtatctataagaattaagttcttatcatgctgaggatctttttgtctgtttttagaagtagatttaatgttgctaatggtagttgttatgtttttattttttgtatttttaaagtgttattcaatgcttgatcgttattgtacctataatttacagtattcgtattgctattgttattcgatatttcttgtaaggacttcttcattatcatattcttgcctaagtttatttctttttttctagaacagtttcttgggtggtgggattcacttttacaatataactccatttttcgatttgaattagatcgtttattttctgttcataattatctgtgttaaaacagtattcatctatcaaaatctccttccacattctatcttttacatctcttggataacgagacataaatcttttccttataaaattataattttcagaagcaggaccttcaagatttctgtagttgtcaaacgttccatcaatggagtttttattgtatttcttaaaattgtgtcttcaaccttatctatcttttaattaacttctaatatattatcaaaattccattttgtaagaaatctttaatgtagctactccatattgggaaatcatctaaagtttttagtgtatattcaattttagctgactcagactcccaatagaattgaattttttcgccacgacaattgtaacacgtataatatttgccattatcctctttgctgaatagtagaactacattttggatatgttgttcaatggtaatcttattgttactatcgttatttagaagatcctttttgttattattaatactgttttcctttatgaagttatcactgttataaaatttttctttattattattaattttaaattttaaaaactcgttaagattttcagttgccttgtttaatcttttagagaataaggtttttgacttttcaatttcatccattttagtattgatttctaaatcagttaaagtattattttctaacagctcattttcttggtctaccaatgtagctaatttatttgtgagaagatcaatttgttttctaagtttaatgattagatcatcattgttcacggcaatgctaccctcttggaaagtagtgatgtttgtatttaatacagtcacgacttaacttattagtaaattggatctctggtttattaaaaacttgtgaaaataaccatgattatatagtatgatttgtataaattgatctctcttcttttgatttttttcttaaaatttttcttgaaaaatatttttcttttctaattatcatcatgaacgacataataaaacagtctttaataaggaaacctaatagacatactgtttattttctaacacatatcttactcaattattcctaatatcacttaacattgtttcttgatttgatatcaatcttcaagatctagcgaatctcttttctaaaaatttccaaaaaatagtctaaaaggaataaaaaaatcaataacaacaacaacttaaacgtactatcagtaaataatcaactatgctccacacacttccatataatacaatttagaacattggtagactaccattcaacatcatgtgatcatggtattctacatctaattatactaggtatagttaactaagacaccataagctataggtaatcctcctgatacatacattatttctagactagatatctattaatagaatactttacattaacataacgtctttataaatataattacttaaaaatattcagacgcaattccttatcaatagtttgaatatgaaaaaaaaagattgtatattactttattatgcattggatgatattatcagatggatatacttactactaactataacatgataacaggaataaataatgaatattcaagcactaattttcattataacatggatgttgtatgacttggaaatgaacattatttattctattcatatctcaattaattgataattctgttactcctcattagacactgtagaataaattaatattgaaacaaatcatcacctacctagaacaaacgatctggaaaataaataatctaacgaatataaaccaactattagactgagactgttttattacaattcctaaaatatgtgctatctttgatcaaaactgtaatattaacaatatgaatataagtaatagaataagaatgtaactaatatattttaacctatccaatacaccaaaattgatttcacatcaattcctataatttatctataatcagatattccattataaaactctcactactagaaatattaattttatagctttaacaaaattgtttttcgttactaaaatttattatattaaaatgatctacttgattattcaaatattaacataaccttgtaacaataaaataaaaaaagatgataatcttggaaagtagtggtgtttgtatttaatacagtcatgacttaacttattagtaaattggatctctggtttattaaaaacctatgaaaataatgcacataattatatgatgtattattgatgagcatgagcgcccgtagtcattggatatatagtaaacattctcaatattatattagatagatatagtatacaaaattataataaagttcttcggtttgtttatttataaaaggtgaacaaggggagaaacatgatatgaaaaaagctggctttatatattttcatatctcctctatctcgtctatgtacggcaccaaatttatgatcaggtttgtttacgtctgctgacaagcaaacagtacgttctccactttttcctatcaattaatgtttactaaaatctaattggtctattattaattctagaaagttcaatttcagcagtaagtgttcatatatggttaatattcatattgtaatatatattacttgagataatttcttacaaaccggtgctaaaacatatacactaatattatttataccgagaaaaaagaacagccttcctttgttacttttgaaataataaaaaacgcaccgataaattaatataaaatatgtattacaagagtagatattggggtatagacaaatactattatatataatacatatgtatattgtttaaaaattaactaaaccatgaatagaaataaggagaaaagcactaagataaaatttgaccgtgtaccagcagtatcaggagcagaagcttcgtattgtgacaaggttatggcacttaatctgctacttggacttgcactttgagaagatacgtgtagttgctctggtgcaacagtaatttgttgactattcatgatacttgaagtagatgaacctgaagtttcataacgtgataatgttactgtatttgatctgccacttggatttgccctttgagaagatacctgtaatggctcttgagttgcagtaacctttggagtatatgtgattgcctcagttgaagaacctgcttgatcttcaaccccgtttcttctggacgatgattcactcttcatagtattccaactgttaacactaaatgtaggagcagaagctttatattgtgacaaggttatggcacttaatctactacttggacttgcactttgagaagatacgtgtagttgctctggtgcaacagtaatttgttgactattcatgatacttgaagtagatgaacctgaagtttcataacgtgataatgttactgtactcgatctgccactcgactctgtggtttgagaagagacgtgtaatggcccttgtgcaatagtattttgttgactattcataataattgaagtagacgaacttgaagtttcatgatgtgataatgttactatacttaatctactgcttggacttgcactttgagaagatacgtgtagtgactctggtgcaacagtaatttgttgactattcatgatacttgaagtagatgaacctgaagtttcataacgtgataatgttactgtatttgatctgccacttggatttgccctttgagaagatacctgtaatggctcttgagttgcagtaacctttggagtatttgtgattgcctcagttgaagaacctgttttactttcaaccccgtttcttctggacgatgattcactcttcatagtactccaactgttaacactaaatgtaggagcagaagctttatattgtgacaaggttttggcacttaatctactacttggacttgcactttgagaagatacgtgtagttgctctggtgcaacagtaatttgttgactattcatgatacttg

SEQ ID NO: 4 - DNA, 4153 bp, Kazachstania heterogenica
  source 1..4153: mol_type = genomic DNA
cacaccatactacaacaaaagtaacattcaggagcttctatggccaagttggtaaggcgccacactagtaatgtggagatcatcggttcgaatccgattggaagcactgctttcttttttatcgattgtgataaccctatggttatgtgtgtctgataacaattaatcttgttggaataacaacaatacttcattcgagtggatatgggatatggacttatgagtgaagggctgcttcttgtattatattattataaatagggtgttataacaatttgttttttttaaacgtctgtttcaattaatgttgaaaatggtttggttatcacgatttttgtgatgtttgtctttatgtttagtttttctttcttaaaaaggcgtaaatgttttgcaaataattttttctaatttcttttgcacattattatataaagaagtgaaatatgggttagttatctctgaaattaattccatatcatttatatgaatatctttattttcattgctggaataatatattacctgtttggggaacatataaatatatcaaagaggaaaaatgtttgttttgcacatttaatattacagagataagatcaaacagaataaaaataaattaatatattatgaagatttgccaaaaggtaaacatatataagtagacgattttacttattaattttccaatctggatgaataagttatatacattttattatatgtttctttttgtatttatataattattaattcccaatcaagagatggagggaaaattactctacatatcaacataataataatacataataataacatacaatatgagcaccgacgctaaaaacatgtgtactaatattattcatccagaggacaaattatgacagaaaataataaaactttttctactgctaatagaagccaagacctgtgtaacaacaaatattttaaataaaatcatttttcaaagttttctaaacacatattatatttgtagaaaaaaggcttgttgtattaattataaaaaaaccaactgcctttaaaagaaagattaaataattaaaaaaaaatagattaacaaaaaagttcggcctttaatgtaacaactattgttttttattctaacctagaattcaataaaaatctcattgaaaagaaaataatattttaactgataaaataattttaataattgaattgactattaaatcaaaatttggctatagtcaataaaaatcaaaaacaaaaatcaatttttttagaaacaatttgtttgtaagcaagatataatcaataaaagaaaagaatgaaaatgatttatttgaaaaaatttaattgttaagataaatttgtctataagtattaaccatactttaaaaataatactctcaaaattatagaataacctttactatgctactgttgaagctatgttatgttaactaaatttaccaaaattttgaaaatatttttatcgtcttaaactcactcatttttttaatcaaatttctgaggaatctagatttacaaatttcttcaatcaaagttcctgtaaaccaaaacataatattaaagcagtattaaattattattggcttgagatcaatttttttaaacaatcaaacactagtgcagcatataaggaacctaataataaaaattttaaaaaaaaaataatggaatttatcaatacagtcactgatagttcttaacacttttctgcatatatttttggtgaaataaaagaaagttcaattccagtgtattttaaaatctgaacaagaaatatacaaattctacggaccaggaatactaaatatagtaaatgaatccttctttaacattattaaacatactttttataaacttttagtgtatgcatatcaaatataggttttttttattttttccattttaaatcaaactctagattattaaatcaagcttaaaataaataaatgagcccaaaatattggtattatgttcccaataataataataaattcaatttttcagcaaaaaaaaagttcacaaaaatattttcattaattactatatttaattttactttattagaggacaaaatgaagtataattttttattaagactgaactacgattaagccaataaaaaaaacaaaaatatagtttatttttatgcagagatacagttaaagtcaccattattccatcagatatcaataaaaaattataattatcatatatttctcaaatttgaacaagcattccgctaattattagtaaacatctattttataataggaaatattcatttaatgaagtgactgtttactatggtgataatttacaataaatattttcctcaatatataaactaatggaaatagaaatttcagtataactgtttactcaagtagagaagaaagtggtggaataattattataatcattgtatattaaaaaagttttttattaatcagaaaattttataatgccaataattctatatgcaatgtctagatatataaaaaaagagcataaattttcaaaagagagaaaaaataagatataagaagataatctatttacttttatacaacataaatgtttatgtatatatataatatgtacaaataaataaaaaaaagatatatatataaactaaaaagatctgatgtgtgttcaacgtttaagaccacaggagtccaataatatctttttaccagatttagaatttgtatacaattccactctctaatctgctgatagaactgccccctttaaaattgatattggatttattctccacgaacctcttattgacattggtagtgaatcttctgctagaaggaatactgctgttaaattaaccaaaaaactacaagcctttactttatgtacctgtagctatttatcagatcgccaaaaaatgctagagactcaagacaatcctcacagaaacctactaaatttaaagttgctggctttattttgcttattagagaagtatatttcaggggaaggaagtatttaaaaatacaattttttttagctccgtttaagattgtgaaagtattaaacaacaagactgtcaaatacagtttactctctttgttcaagaaggacaaagtaatcaatatctaacattaagaagtttataaataatactcaacattattctaagaaattactgattacgactacaaaaagattataaagtgttgaaataaaatgttttataatgaaatagatagaacaataagattttagcagacactaaacgataaattgttgggtaataatcgttgagaggtcaccaaaggttgttgagtttgtttattaaatatcttactattcgtagaggaaaatggttgaatgttaacatatataaagccaaggatttcatcatacattatttttatcttatttacaatctttgtatattattatttctatgttgtatatagagaaaaaaagcaaagaactttattataattttgtatactaaatctgtttaatataatattgagaatgtttactatatatccaatgaataaaggcgctcattctcaacataaagacttcctgaaattattagtgtgagtgattatgatataaaatccacccatataccacgtatcttgacacaaaatctattgtataacaaaaagcaatcagcatcaagagtacataaaattctagttaaatctaaaaatacctattgttattgaaacatcacccatttatcaccacttctcataatacttgtgccatttaccactataccatattatcctaaatattccatgaagtctgaccaaatcattacaaataataaattgaggtatggtttactaatcaattacgatagcggattgaatagttgatagaaccagatatatataaaaagacaacattttctgggacttgattaactattcagattgatatagtaatggattagtaatctaatccctacttgattccttataataatttgggtacactaatgataaacagcacaattcttatgatcattagtagtaagtgtgtaacttattaaaacaataaataattctagattcactcagaatcttatgtagtattgatgatgataacctccttattatggatcatatcgtgttgtaatatgagatggtgagattcttta

SEQ ID NO: 5 - DNA, 956230 bp, Kazachstania heterogenica
  source 1..956230: mol_type = genomic DNA
tatttctagactagatatctattaatagaatactttacattaacataacgtctttataaatataattacttaaaaatattcagacgcaattccttatcaatagtttgaatatgaaaaaaaaagattgtatattactttattatgcattggatgatattatcagatggatatacatactactaactataacatgataacaggaataaataatgaatattcaagcactaattttcattataacatggatgttgtatgacttggaaatgaacattatttattctattcatatctcaattaattgataattctgttactcctcattagacactgtagaataaattaatattgaaacaaatcatcacctacctagaacaaacgatctggaaaataaataatctaacaaatataaaccaattattagactgagactgttttattacaattcctaaaatatgtgctatctttgatcaaaactgtaatattaacaatatgaatataagtaatagaataagaatgtaactaatatattttaacctatccaatacaccaaaattgatttcacatcaattcctataatttatctataatcagatattccattataaaactctcactactagaaatattaattttatagctttaacaaaattgtttttcgttactaaaatttattatattaaaatgatctacttgattattcaaatattaacataaccttgtaacaataaaataaaaaaagatgataatcttggaaagtagtggtgtttgtatttaatacagtcatgacttaacttattagtaaattggatctctggtttattaaaaacctatgaaaataatgcacataattatatgatgtattattgatgagcatgagcgcccgtagtcattggatatatagtaaacattctcaatattatattagatagatatagtatacaaaattataataaagttcttcggtttgtttatttataaaaggtgaacaaggggagaaacatgatatgaaaaaagctggctttatatattttcatatctcctctatctcgtctatgtacggcaccaaatttatgatcaggtttgtttacgtctactgacaagcaaacagtacgttctccacttttggcgtatcaattaatgtttactaaaatctaattggtctattattaattctagaaagttcaatttcagcagtaagtgttcatatatgattaatattcatattgtaatatatattacttgagataatttcttacaaaccggtgctaaaacatatacactaatattatttataccgagaaaaaagaacagccttcctttgttacttttgaaataataaaaaacgcaccgataaattaatataaaatatgtattacaagagtagatattggggtatagacaaatactattatatataatacatatgtatattgtttaaaaattaactaaaccatgaatagaaataaggagaaaagcactaagataaaatttgaccgtgtaccagcagtatcaggagcagaagcttcgtattgtgacaaggttatggcacttaatctgctacttggacttgcactttgagaagatacgtgtagttgctctggtgcaacagtaatttgttgactattcatgatacttgaagtagatgaacctgaagtttcataacgtgataatgttactgtatttgatctgccacttggatttgccctttgagaagatacctgtaatggctcttgagttgcagtaacctttggagtatatgtgattgcctcagttgaagaacctgcttgatcttcaaccccgtttcttctggacgatgattcactcttcatagtattccaactgttaacactaaatgtaggagcagaagctttatattgtgacaaggttttggcacttaatctgctacttggacttgcactttgagaagatacgtgtagttgctctggtgcaacagtaatttgttgactattcatgatacttgaagtagatgaacctgaagtttcataacgtgataatgttactgtactcgatctgccactcgactctgtggtttgagaagagacgtgtaatggcccttgtgcaatagtattttgttgactattcataataattgaagtagacgaacttgaagtttcatgatgtgataatgttactatacttaatctactgcttggacttgcactttgagaagatacgtgtagttgctctggtgcaacagtaatttgttgactattcatgatacttgaagtagatgaacctgaagtttcataacgtgacaatgttactgtattcgatctactatttggattagcactttgagaagatacctgtaatggctcttgagttgcagtaacctttggagtatttgtgattgcctcagttgaagaacctgttttactttcaaccccgtttcttctggacgatgattcactcttcatagtactccaactgttaacaccagaagtttctatgtttcctgtagttgcagtgttctcgttagaggaccttgacctgtcagaaactgctgaagagaatgatgattcaattgtcctagtgttccaattattggcattagatgcttcagcatttgttgtccttctaatgctttcctttgaatatttcgaaattgaactgtatgaccttgacaattttgtggaaactactgaagaattccaatagtgatatcccaaacttgtactagtgactgttggggtaccaacaattacaacaccgattggagtgctgctgccgtcagaattggtagtgtagaagatggaggtggtgatgatagaggttgagcgaccagtggccgcaacataagaagtgatagcgcttggcattggggtttcgacaatcacaatgtctactggagtgctgctgccgtcagagttggtagtgtaggaggtggaggtgaaggtgacagtggatgaaagaccggtggctgcaacataagaagtgatagcgcttggcattggggtttcgacaatcacaatgtctactggagtgctgctaccgtcagagttggtagtgtaggaggtggaggtaaacatgatagaagctgaaccaaccatgcctggaacatatttcgtgatagcgcttggcattggggtttccacaatcacaatgtctactggagtgctgctgccatcagagttggtagtgtaggaggtggaggtaaacatgatagaagctgaaccaaccatgcctggaacatatttcgtgatagcgcttggcattggggtttccacaatcacaatgtctactggagtgctgctgccatcagagttggtagtgtaggaggtggaggtgaatgtaacagttggtgagagaccggtagctgcaacataagaagtgatctgacttggcattggagtctcgacaatcacaatgtcaactggagtgctgctgccatcagagttggtagtgtaggaggtggaggtgaaggtgacagtggatgaaagaccggtggctgcaacataagaagtgatagcgcttggctttggggtttgaacaatcacgacaataactggagtactgctgcccatggaattggtagtatacatagtgctggtgaatgtacttggcattggggtctcaacaatcacaacaccaatgtgagtgctcctgccgttcttgtcggtggtgtacatggtggaggtggagacaacagaagcagaaccaaccatgcctggaacataggaggtgatcacagatggcattggggtctcaacaatcacaacaccaatgtgggtgctgctgccgttgttgtcggtggtgtacatggtggaggtggagacaacagaagaagaaccaaccatgcctggaacataggaggtgatcacagatggcattggggtctcaacaatcacaacaccaatgtgggtgctgctaccgttgtagttggtggtgtacaaggtggaggtggagacaacagaagaagaaccaaccatgcctggaacataggaagtaatgacacttggcattggggtttcaacaatcacaacaccaatgtgggtgctgctaccgttgtagttggtggtgtacagggtggaggtggatagaacagaagcagaaccaaccatgcctggaacataggaggtgatcacagatggcattggggtttcgacaatcacaacaccaatatgagtgctgctgccgttgtagttggtggtgtatagggtggaggtggatagaacagaagcagaaccaaccatgcctggaacataggaggtgatcacagatggcattggggtttcaacaatcacaacaccaatgtgggtgctgctgccgttgtagttggtggtgtacagggtggaggtggatagaacagaagcagaaccaaccatgcctggaacataggaagtaatgacacttggcattggggtttcaacaatcacaacaccgatgtgggtgctgctgccgttgtagttggtggtgtacagggtggaggtggatagaacagaagcagaaccaaccatgcctggaacataggaggtgatcacagatggcattggggtctcaacaatcacaacaccaatgtgggtgctgctgccgttgtagttggtggtgtatagggtggaggtggatagaacagaagaagaaccaaccatgcctggaacataggaggtgatcacagatggcattggggtctcaacaatcacaacaccaatgtgggtgctgctgccgttgtagttggtggtgtacagggtggaggtggatagaacagaagcagaaccaaccatgcctggaacataggaggtgatcacagatggcattggggtctcaacaatcacaacaccaatatgagtgctgctgccgttgtagttggtggtgtatagggtggaggtggatagaacagaagcagaaccaaccatgcctggaacataggaggtgatcacagatggcattggggtctcaacaatcacaacaccaatgtgggtgctgctgccgttgtagttggtggtgtatagggtggaggtggatagaacagaagaagaaccaaccatgcctggaacataggaggtgatcacagatggcattggggtctcaacaatcacaacaccaatgtgggtgctgctgccgttgtagttggtggtgtacagggtggaggtggatagaacagaagcagaaccaaccatgcctggaacataggaagtaatgacacttggcattggggtctcaacaatcacaacaccaatgtgggtgctgctaccgttgtagttggtggtgtatagggtggaggtggatagaacagaagcagagccaaccatgcctggaacataggaagtaatgacacttggcattggggtttcaacaatcacaacaccaatgtgggtgctgctgccgttgtagttggtggtgtacatggtggaggtggatagaacagaagcagagccaaccatgcctggaacataggaggtgatcacagatggcattggggtctcaacaatcacaacaccaatgtgggtgctgctgccgttgtagttggtggtgtacagggtggaggtggatagcacagaagcagaaccaaccatgcctggaacataggaggtgatcacagatggcattggggtctcaacaatcacaacaccaatgtgggtgctgctgccgttgtagttggtggtgtatagggtggaggtggatagaacagaagcagaaccaaccatgcctggaacataggaggtgatcacagatggcattggggtctcaacaatcacaacaccaatgtgggtgctgctgccgttgtagttggtggtgtatagggtggaggtggatagaacagaagcagaaccaaccatgcctggaacataggaagtgatcacagatggcattggggtctcaacaatcacaacaccaatgtgggtgctgctgccgttgtagttggtggtgtacagggtggaggtggatagcacagaagcagaaccaaccatgcctggaacataggaggtgatcacagatggcattggggtctcaacaatcacaacaccaatgtgggtgctgctgccgttgtagttggtggtgtatagggtggaggtggatagaacagaagcagaaccaaccatgcctggaacataggaggtgatcacagatggcattggggtctcaacaatcacaacaccaatgtgggtgctgctgccgttgtagttggtggtgtacagggtggaggtggatagaacagaagcagaaccaaccatgcctggaacataggaggtgatcacagatggcattggggtttcaacaatcacaacaccgatgtgggtgctgctgccgttgtagttggtggtgtacagggtggaggtggatagaacagaagcagagccaaccatgcctggaacataggaagtgatcacagatggcattggggtctcaacaatcacaacaccaatgtgggtgctgctgccgttgtagttggtggtgtacagggtggaggtggatagaacagaagcagaaccaaccatgcctggaacataggaggtgatcacagatggcattggggtctcaacaatcacaacaccaatgtgggtgctgctgccgttgtagttggtggtgtacagggtggaggtggatagaacagaagcagaaccaaccatgcctggaacataggaagtaatgacacttggcattggggtctcaacaatcacaacaccaatgtgggtgctgctgccgttgtagttggtggtgtacagggtggaggtggatagaacagaagcagaaccaaccatgcctggaacataggaagtaatgacacttggcattggggtctcaacaatcacaacaccaatgtgggtgctgctgccgttgtagttggtggtgtacagggtggaggtggatagaacagaagcagaaccaaccatgcctggaacataggaggtgatcacagatggcattggggtctcaacaatcacaacaccaatgtgggtgctgctgccgttgtagttggtggtgtacagggtggaggtggatagaacagaagcagaaccaaccatgcctggaacataggaggtgatcacagatggcattggggtctcaacaatcacaacaccaatgtgggtgctgctgccgttgtagttggtggtgtacagggtggaggtggatagaacagaagcagaaccaaccatgcctggaacataggaggtgatcacagatggcattggggtctcaacaatcacaacaccaatgtgggtgctgctgccgttgtagttggtggtgtacagggtggaggtggatagaacagaagcagaaccaaccatgcctggaacataggaggtgatcacagatggcattggggtttcaacaatcacaacaccaatgtgagtgctgctgccgttgtagttggtggtgtacaaggtggaggtggatagaacagaagcagaaccaaccatgcctggaacataggaggtgatcacagatggcattggggtctcaacaatcacaacaccaatgtgggtgctgctgccgttgtagttggtggtgtacagggtggaggtggatagaacagaagcagaaccaaccatgcctggaacataggaggtgatcacagatggcattggggtctcaacaatcacaacaccaatgtgggtgctgctgccgttgtagttggtggtgtacagggtggaggtggatagcacagaagcagaaccaaccatgcctggaacataggaggtgatcacagatggcattggggtctcaacaatcacaacaccaatgtgggtgctgctgccgttgtagttggtggtgtacagggtggaggtggatagaacagaagcagaaccaaccatgcctggaacataggaggtgatcacagatggcattggggtctcaacaatcacaacaccgatgtgggtgctgctgccgttgtagttggtggtgtacagggtggaggtggatagaacagaagcagagccaaccatgcctggaacataggaggtgatcacagatggcattggggtctcaacaatcacaacaccgatgtgggtgctgctgccgttgtagttggtggtgtacagggtggaggtggatagaacagaagcagaaccaaccatgcctggaacataggaggtgatcacagatggcattggggtctcaacaatcacaacaccaatgtgggtgctgctgccgttgtagttggtggtgtacagggtggaggtggatagaacagaagcagaaccaaccatgcctggaacataggaggtgatcacagatggcattggggtttcaacaatcacaacaccaatgtgggtgctgctgccgttgtagttggtggtgtacagggtggaggtggatagaacagaagcagaaccaaccatgcctggaacataggaggtgatcacagatggcattggggtttcaacaatcacaacaccaatgtgagtgctgctgccgttgtagttggtggtgtacaaggtggaggtggatagaacagaagcagaaccaaccatgcctggaacataggaggtgatcacagatggcattggggtctcaacaatcacaacaccaatgtgggtgctgctaccgttgtagttggtggtgtacagggtggaggtggatagaacagaagcagaaccaaccatgcctggaacataggaggtgatcacagatggcattggggtttcaacaatcacaacaccaatgtgggtgctgctgccgttgtagttggtggtgtacagggtggaggtggatagaacagaagcagaaccaaccatgcctggaacataggaggtgatcacagatggcattggggtctcaacaatcacaacaccaatgtgggtgctgctgccgttgtagttggtggtgtacagggtggaggtggatagaacagaagcagaaccaaccatgcctggaacataggaggtgatcacagatggcattggggtttcaacaatcacaacaccaatgtgggtgctgctgccgttgtagttggtggtgtacagggtggaggtggatagaacagaagcagaaccaaccatgcctggaacataggaggtgatcacagatggcattggggtctcaacaatcacaacaccaatgtgggtgctgctgccgttgtagttggtggtgtacagggtggaggtggatagaacagaagcagaaccaaccatgcctggaacataggaggtgatcacagatggcattggggtctcaacaatcacaacaccaatgtgggtgctgctgccgttgtagttggtggtgtacaaggtggaggtggatagaacagaagcagaaccaaccatgcctggaacataggaagtaatgacacttggcattggggtctcaacaatcacaacaccaatgtgggtgctgctgccgttgtagttggtggtgtacaaggtggaggtggatagaacagaagcagagccaaccatgcctggaacataggaagtaatgacacttggcattggggtctcaacaatcacaacaccaatgtgggtgctgctgccgttgtagttggtggtgtacagggtggaggtggatagaacagaagcagaaccaaccatgcctggaacataggaagtgatcacagatggcattggggtctcaacaatcacaacaccaatgtgggtgctgctgccgttgtagttggtggtgtacagggtggaggtggatagaacagaagcagaaccaaccatgcctggaacataggaggtgatcacagatggcattggggtctcaacaatcacaacaccaatgtgggtgctgctgccgttgtagttggtggtgtacagggtggaggtggatagaacagaagcagaaccaaccatgcctggaacataggaagtgatcacagatggcattggggtctcaacaatcacaacaccaatgtgagtgctgctgccgttgtagttggtggtgtacaaggtggaggtggatagaacagaagcagaaccaaccatgcctggaacataggaggtgatcacagatggcattggggtctcaacaatcacaacaccaatgtgggtgctgctgccgttgtagttggtggtgtacagggtggaggtggatagaacagaagcagaaccaaccatgcctggaacataggaagtgatcacagatggcattggggtctcaacaatcacaacaccaatgtgggtgctgctgccgttgtagttggtggtgtacagggtggaggtggatagaacagaagcagaaccaaccatgcctggaacataggaggtgatcacagatggcattggggtctcaacaatcacaacaccaatgtgggtgctgctgccgttgtagttggtggtgtatagggtggaggtggatagaacagaagcagaaccaaccatgcctggaacataggaggtgatcacagatggcattggggtctcaacaatcacaacaccaatgtgggtgctgctgccgttgtagttggtggtgtacagggtggaggtggatagaacagaagcagaaccaaccatgcctggaacataggaggtgatcacagatggcattggggtctcaacaatcacaacaccaatgtgggtgctgctgccgttgtagttggtggtgtacagggtggaggtggatagaacagaagcagaaccaaccatgcctggaacataggaggtgatcacagatggcattggggtctcaacaatcacaacaccaatgtgggtgctgctgccgttgtagttggtggtgtacagggtggaggtggatagaacagaagcagaaccaaccatgcctggaacataggaggtgatcacagatggcattggggtctcaacaatcacaacaccaatgtgggtgctgctgccgttgtagttggtggtgtacagggtggaggtggatagaacagaagcagaaccaaccatgcctggaacataggaagtgatcacagatggcattggggtttcaacaatcacaacaccaatgtgagtgctgctgccgttgtagttggtggtgtatagggtggaggtggatagaacagaagcagaaccaaccatgcctggaacataggaggtgatcacagatggcattggggtctcaacaatcacaacaccaatgtgggtgctgctgccgttgtagttggtggtgtacagggtggaggtggatagaacagaagcagaaccaaccatgcctggaacataggaggtgatcacagatggcattggggtctcaacaatcacaacaccaatgtgggtgctgctgccgttgtagttggtggtgtacagggtggaggtggatagaacagaagcagaaccaaccatgcctggaacataggaggtgatcacagatggcattggggtctcaacaatcacaacaccgatgtgggtgctgctaccgttgtagttggtggtgtacagggtggaggtggatagaacagaagcagaaccaaccatgcctggaacataggaagtgatcacagatggcattggggtctcaacaatcacaacaccaatgtgggtgctgctgccgttgtagttggtggtgtacagggtggaggtggatagcacagaagcagaaccaaccatgcctggaacataggaggtgatcacagatggcattggggtctcaacaatcacaacaccaatgtgggtgctgctgccgttgtagttggtggtgtacagggtggaggtggatagaacagaagcagaaccaaccatgcctggaacataggaggtgatcacagatggcattggggtctcaacaatcacaacaccaatgtgggtgctgctgccgttgtagttggtggtgtacaaggtggaggtggatagaacagaagcagaaccaaccatgcctggaacataggaggtgatcacagatggcattggggtctcaacaatcacaacaccaatgtgggtgctgctgccgttgtagttggtggtgtacagggtggaggtggatagaacagaagcagaaccaaccatgcctggaacataggaggtgatcacagatggcattggggtttcaacaatcacaacaccaatgtgagtgctgctgccgttgtagttggtggtgtacaaggtggaggtggatagaacagaagcagaaccaaccatgcctggaacataggaagtaatgacacttggcattggggtctcaacaatcacaacaccaatgtgggtgctgctgccgttgtagttggtggtgtacaaggtggaggtggatagaacagaagcagaaccaaccatgcctggaacataggaagtgatcacagatggcattggggtctcaacaatcacaacaccaatgtgggtgctgctgccgttgtagttggtggtgtacagggtggaggtggatagcacagaagcagagccaaccatgcctggaacataggaggtgatcacagatggcattggggtctcaacaatcacaacaccaatgtgggtgctgctgccgttgtagttggtggtgtacaaggtggaggtggatagaacagaagcagaaccaaccatgcctggaacataggaggtgatcacagatggcattggggtctcaacaatcacaacaccaatgtgggtgctgctgccgttgtagttggtggtgtacagggtggaggtggatagaacagaagcagaaccaaccatgcctggaacataggaagtgatcacagatggcattggggtctcaacaatcacaacaccaatgtgggtgctgctgccgttgtagttggtggtgtacagggtggaggtggatagacacagaagcagaaccaaccatgcctggaacataggaggtgatcacagatggcattggggtctcaacaatcacaacaccaatgtgggtgctgctaccgttgtagttggtggtgtacaaggtggaggtggatagaacagaagcagaaccaaccatgcctggaacataggaagtaatgacacttggcattggggtctcaacaatcacaacaccaatgtgggtgctgctgccgttgtagttggtggtgtacagggtggaggtggatagaacagaagcagaaccaaccatgcctggaacataggaggtgatcacagatggcattggggtctcaacaatcacaacaccaatgtgggtgctgctgccgttgtagttggtggtgtacagggtggaggtggatagaacagaagcagaaccaaccatgcctggaacataggaagtaatgacacttggcattggggtctcaacaatcacaacaccaatgtgggtgctgctgccgttgtagttggtggtgtatagggtggaggtggatagaacagaagcagaaccaaccatgcctggaacataggaagtaatgacacttggcattggggtttcaacaatcacaacaccaatgtgggtgctgctgccgttgtagttggtggtgtacagggtggaggtggatagaacagaagcagaaccaaccatgcctggaacataggaagtgatcacagatggcattggggtctcaacaatcacaacaccaatgtgagtgctgctgccgttgtagttggtggtgtacagggtggaggtggatagaacagaagcagaaccaaccatgcctggaacataggaagtgatcacagatggcattggggtttcaacaatcacaacaccaatgtgggtgctgctgccgttgtagttggtggtgtacaaggtggaggtggatagaacagaagcagaaccaaccatgcctggaacataggaagtaatgacacttggcattggggtctcaacaatcacaacaccaatgtgagtgctgctgccgttgtagttggtggtgtacagggtggaggtggatagaacagaagcagaaccaaccatgcctggaacataggaggtgatcacagatggcattggggtctcaacaatcacaacaccaatgtgggtgctgctgccgttgtagttggtggtgtacagggtggaggtggatagaacagaagcagaaccaaccatgcctggaacataggaggtgatcacagatggcattggggtctcaacaatcacaacaccaatgtgggtgctgctgccgttgtagttggtggtgtacagggtggaggtggatagaacagaagcagaaccaaccatgcctggaacataggaagtgatcacagatggcattggggtctcaacaatcacaacaccaatgtgagtgctgctgccgttgtagttggtggtgtacagggtggaggtggatagacacagaagcagaaccaaccatgcctggaacataggaggtgatcacagatggcattggggtctcaacaatcacaacaccaatgtgggtgctgctgccgttgtagttggtggtgtacagggtggaggtggatagcacagaagcagagccaaccatgcctggaacataggaggtgatcacagatggcattggggtctcaacaatcacaacaccaatgtgggtgctgctgccgttgtagttggtggtgtacagggtggaggtggatagcacagaagcagaaccaaccatgcctggaacataggaggtgatcacagatggcattggggtctcaacaatcacaacaccaatgtgggtgctgctgccgttgtagttggtggtgtacaaggtggaggtggatagaacagaagcagaaccaaccatgcctggaacataggaggtgatcacagatggcattggggtctcaacaatcacaacaccaatgtgggtgctgctgccgttgtagttggtggtgtacaaggtggaggtggatagaacagaagcagaaccaaccatgcctggaacataggaagtaatgacacttggcattggggtctcaacaatcacaacaccaatgtgggtgctgctgccgttgtagttggtggtgtacagggtggaggtggatagaacagaagcagaaccaaccatgcctggaacataggaggtgatcacagatggcattggggtctcaacaatcacaacaccaatgtgggtgctgctgccgttgtagttggtggtgtacatggtggaggtggatacaacagaagcagaaccaaccatgcctggaacataggaggtgatcacagatggcattggggtctcaacaatcacaacaccaatgtgggtgctgctgccgttgtagttggtggtgtacagggtggaggtggatagcacagaagcagaaccaaccatgcctggaacataggaagtaatgacacttggcattggggtctcaacaatcacaacaccaatgtgggtgctgctgccgttgtagttggtggtgtacagggtggaggtggatagacacagaagcagaaccaaccatgcctggaacataggaagtgatcacagatggcattggggtttcaacaatcacaacaccaatgtgagtgctgctgccgttgtagttggtggtgtacagggtggaggtggatagacacagaagcagaaccaaccatgcctggaacataggaggtgatcacagatggcattggggtctcaacaatcacaacaccaatgtgggtgctgctgccgttgtagttggtggtgtacagggtggaggtggatagacacagaagcagaaccaaccatgcctggaacataggaggtgatcacagatggcattggggtctcaacaatcacaacaccaatgtgggtgctgctgccgttgtagttggtggtgtacagggtggaggtggatagaacagaagcagaaccaaccatgcctggaacataggaggtgatcacagatggcattggggtctcaacaatcacaacaccaatgtgggtgctgctgccgttgtagttggtggtgtacaaggtggaggtggatagaacagaagcagaaccaaccatgcctggaacataggaggtgatcacagatggcattggggtctcaacaatcacaacaccaatgtgggtgctgctgccgttgtagttggtggtgtacaaggtggaggtggatagaacagaagcagagccaaccatgcctggaacataggaggtaatgacacttggcattggggtctcaacaatcacaacaccaatgtgggtgctgctgccgttgtagttggtggtgtacagggtggaggtggatagcacagaagcagaaccaaccatgcctggaacataggaggtgatcacagatggcattggggtctcaacaatcacaacaccaatatgagtgctgctgccgttgtagttggtggtgtacagggtggaggtggatagaacagaagcagaaccaaccatgcctggaacataggaagtaatgacacttggcattggggtctcaacaatcacaacaccaatgtgggtgctgctgccgttgtagttggtggtgtacaaggtggaggtggatagaacagaagcagaaccaaccatgcctggaacataggaggtgatcatgcttggagcatgcgagatcagagcggttggcattggtgtttctacaatcacaatgtcaatgtgggtgctgctacccttggagttcgtagtgtaagatgtgagggtgaagagaacatcagtcgaatcaatcatacctgcaacgaatgatgtaattacacttgccattggggtcttaacgcttacatcgtccattggagtgctgctgcccctggggttggtggtggagtcatcagaggcagatccaatcatcgttggagcatgtgagatcatagcagttggcattggagtctcaacaattactatgtcaattggagtgctgctacccttggagttggtggtgtaggaggtgagggtgaaaagaacagtggttgaatcaaccatgcctgcaacgaacgatgtgaccgcacttggtattggagtggccactacaacaacaacttctggagatgaagaaccgttactgtcagtgacgatagtagtataggtggttgtggttggggcagaaatgcttgcagcaatagtagtgtaggttgtggatggggatggagtgatcactaccacaacaacctctggagaagatgaaccgtcgccatcaacaagtgtggtggtgtaggtggttgtagttggaactgtgacatctgcagtagtagtagtgtaggtggtggatggggatggggtgaccacaacaacaacaacttctggagaagatgaaccatcgtggtcaattactgtggtatatgtggttgtagttagagctctgacatctgcagtagtagtggtgtaggaggtagatggggatggggtgaccacaacaacaacaacttctggagaagatgcaccgaaattgtccataactgtggttgtgtaagtagatgtaattggaactttgacatctgcggtagtcgtagtgtaggaggtcattggagctggggtgatcactaccacaacaacttcctcagatgaagagccattgctatcagtggtagtagtggtgtaagtagtggttgttaggaaaaaaactggagcagaagtggtagtataggtggtggatggtggtggctcaatcactattataacagcctcattaaactcttgagtaagactataatcattgttgtagttatagactatagtatgagaggtagttgtagtcggggccgtaacatctccagtagtagtggtgtagaaagtggctggatacggcctaaatatgttcacagccatggcttgagatgtaataccgttgttctcatagacgccgatttggaccgtgtaggtagccgatgcaaatccccaacctgtctgatacagtgtttgcattggctgattaacaactgtaatgatgtttacctgtgcgtcgtccttattgaaccaatctgtcgtagtgatggtagtaacagtgctaggtgtaggcaaatctctaacataagattgaacagtcatctcgtaccgagtattgaaaatggttgtagaaggatgactaacggtaagtgcggaacagaactcctcccgctcttcatcatcttccgcgtacgagtatagagcatcaccgaaatcagtgataataataccaccaggtagatggatagctactttaaggatacctctttgtttcacgttagtataaacagctttaaatggataggaatacccagcctccagatacaccttatggccacctccccctaacctaccaccttcactcgaagtaagtttgaacataacatcatcagaggagaaggttgatgttcggttgcagcaatcaaatgctgcaccggcaccaaagaaaaaagcggcataatcgtccacttctagggacatagtgtaaataccagtaaatggggcaacaaagtaaccagtggccaccatcgtaaagtgtgtgatgggcactcccgtataaccatatgggggcacaattgcaggccaaccggaatcccagttaagatttgtgacacctttgatttcaccaacataacgaaatttcttataaccactgatggggaagtctgggctattgatatctacaatatcaccaagtggatattcgtagaattcgacagtagcacctggctgaattatttttccagtaaggcatgcttttggggtgatattaccagcgaacgaaacatgaaaaaccgtaaaaagcaacagaatggagagaaactttctagtgattgaacgtatatcactgtgcattttgaatgaatgaatgtcttgggttgtagagaaaaagatttgtgtactttttccctgggttgagcaaagatactttaagagacttattacttgatcaaacttttaattttacctgtgtttaatgctcttggagctgtggtgttttattcatagcaagaaggaaggaaaggagaataattcacgaaaagaagagatgaccaaatcatatagtatttatttttatatctttagaaatatgaacaatctaacaaaaaaacatcaagacatttataaaaaaacttgtagattgaattaaaagtattgttctcttggtcataataaacaataaaagacaaatatttttacaaaaaactatgataacggttgataacaattaaaatccttgagatcaaggagacatgtctttgttgagatgaaaataaaaaaaagaagcaaaagagcttagtaataaacaaattcagggaaaagcacttgatgtttacgattcttggtcattaaaaatgtttattggtaaaaaatgctttataataagataagagaacttacatcaactctttgctaaaaaaaccaatggaaaaaaggacaaatacgcaatgcatatcctattgtcgcacaagaatatcccgatttggacaagatttgtccaacagttctgaaggaactgtaaaaaaacactttcaaagttggccttttttggaatttttttcctactctggaaataatagaaataaaacagtattttcggtaaatacagtgagagaattaaaaatgtcttttcccgttaaggcatacaaaagaaagaaaggaaaggaaaaggggtaaaggcaaaaatagagtttcaaaaagtgcttttatcttcaatagttttccaaagacttgctcaggagcagcgcaacaaataatagtataatagaataaaataagacgacaaataataaaagaataaaaacgatggtaacaatgaaagaaaatagtaccagtaagtgttgccccaaaaaattgatagatctttcttacgtgttgcatatacataatatcggcaaataactttagaagaatagattatttttggaatattagatggaacaatgttgtttgtagaaaaacataagatgtgggattgaatagcgagttttttttgacctgttaagaatttttttaaaatttcctcgtttaaatgttcttaaaaacaagttaaatctaatcaaactatacagtaaagaaaatatctcattattttttagagctatatgttatgccaatgaagaataggaagcaactggtggacataatatctaaaattatcagccttaaccctataaagaattattttcttacagtgtatgtatttttaataaaataataaaagcaagattactattttaaaattgcaatcttcaaaaatttttgtacataaaaaacatgtctttcaagaaaaaatttggaagataaaacaagaaattttaaatcttttgtttttgactttctttttcttatttgtctgttttaaatttcctttctagtatatcccccaccccaataaacttggaaaaacaaaagaactgatcttattatgatctgaaaatttacaataaaaaagccgtttttaaaaaagtagatgatgagttttttagagacttttttttgtttttgttttaaaaaaaattttcaatgttccgtgaacgacatcatccagaggtagacaaaagttatgcgcgatttatttgatgtcatatgtattgttctttttgattaaagattttgattgttccccaaaatctgttcatatgattattgaatacaaaagtatctttttgatttgggtataataataccgtacattttttttactattagcatgcatttataaccaattagcacagcatagttgtatattggaacaactaaactagagtttaaaaaaactggtttttttttattgaatttaggtgatgaaaaaattttttatcatggaactattgttatatgtgaaaaatgcaatacgtctggtgatgtcaagtttcagtatcaaacactttaatatttttattacaagccaataagacattgacaatatcataggttatcaactatttatagaatgttattggcactataaatatatcttattagtgaaaattaaggggtgttacctcaattcctcatactgttaaaaataaaatactggtaatttactcccgacatcaacaattaccacgtttctttttcatcttagaattactctggccacttcttgctcttgctttacttcttctaccattcaaactcttttcaatatcttgtcttcattattactacagtcaccttcgaaaatccctagatacttctttcttagggcttatcataaggaacaagaagaacgaacgagaagaaggcacaagaaaccaaggattaaataagtttagatatatagtatataagtgtatacttttaggttatcttagattagggatatagatatataggaatattacacctagagatatagaaagagtctatatcttatatctatccaagtaaaatattattgagatttcaacaagaattactgttatcagaaacacataacctcaggattattaacgaataatggtgtcatcaataaccaatagattctacggcatatctactggattaaattcaaaggtattatcttcaataattttctcatagataggtaaagtcactggtaaggaaagtgtttatctaattaattcaaaggctatgccaaatttatttacagttaaaaatcatatcagatctattttcatacaaataaccaggacttagatactattgaaaaaattttttagcaaatagctgtactttcattatgttctagctaaactacttttacaacattagcctattctctatactattaagcttgtcaatagcgacagctctttattatcagaatactgaaattattgtactgattactttagttccatccgctttgtataccaccaccactggtaatatctctactttaaccacaattacatcaatttatgcttctacactaatacgaaaatgaatctttttcagtagattttgttgttattgttgtcactccatctctctctagcaccaacaccattcactattagtggaaagttcactaacaatgagaactaaccaacacctagctgttgcaaagcatcatttgcggttgttattagacctacaagaaataatatacacatcacagaatatagccggtattgttgttattattcctgtttctagtttgttaaattggatactattggttactaaagtagtttgaacattgccctttgttaacccaaaacagtagtaatgcatgatatattgttgctagatgttggttggttttcattgttagtggatattttaactatagccacagtgtagatgatagattaagacggagtaacaacaacaacaataacattggctggtaaagatttgttgttgtctgtaactgtagtagtctagattaatatagctgtgggtactccaacttcattaagaatctttaaggattcagaaatttttgtgtcatatctaacatacaggaaatctacaattttttgtaaaaaaaactgaaactgcttaaggtgacacttcaatggttttaagttcagtagtttgcaaagttacaaaaaccataatttattttctagaactacctagaaattccataacaattgtgattatcattattgaatgtaatgatattgaactggtttataataaaaaataggaccaaaaagaagaaatcaacttatttttacagaacacctatgtctttaatcagtgaacttattagattcataattcatatatgtcgttcttttttgtttgtatatagtatatgttagaacatagacagtatgtctattaggttttcttattaaagactgttttattatgtcgttaataataataattaaaagagaaaaatatttttcaagaagaaaaattttaagaaaaaaaaattttaagaaaaaaaaatttaaagaaaagaatcaaaagaagagagatcattttatatttgcagataacatattatataattatatacattactttaatatgtttttaataaaccagagatccaatttactaataagttaagtcatgactgtattaaatacaaacaccacgactttccaagaaataaaacgctgtgtcatacagtaagcaatatgctaccactccaaacaaccagtgtctcatctttagtcataaaaaatatttcttactaatatactaaatactgttttttatttgatagtactctagtaataattggtttgaactcgaatagaacattatgaaatcgctatactgatgttttttatcatataaatttcgcgaatcctcattaacttttactttaaactctatttggactacaacaaaaatatcttttatagatatttctgctggaatgatatattactggtttgagaaacatgtaattatatcaaagaagaaaaatgtttgttttgcacaatcaatattacagagacaagatcaaacagaatcaaaataaattaatatattatgaaaaattgccaaaaggtaaacacatataagtagacgactttacttattaattttgcaacctggataaattacgttatattgtatgcttcttttacatttatataattattaattccaaaataagagatcgaggggaaattactctacatattgacatcacaatgacatataatatgatcaccaacgctaaacacatgtatactaatattattcatccaaaagaaacacgatcctgtttaatacatgtattggttctatccaaatattatgaagatgcaatagcaattcttactaatcaacactatctgcatgacgaattttcagtaaccaaaacacaacttggcattattgtaattttctgaaaaacagaatgaagaatttttatatttccagaaaagtaacatctacacttgtaatgtgaattcaaattggtggtgctatattaaaataaaaaaaattggaagtattagaaaaaattgaaatttctttgaaaatttttcttatttattattgtttatatttagctaactcaaatttttcctttttttcatgaaagatttttttgtttgtacgttccagtaaaacagaaaaacatcctcttgtcatgtaaacacacattcagaccaattaccacagaaacctcatttcacttttcaattattctgtaataacaaaagcaaagaaaatttttggcaaaagtaaaaatacttaattccaatttctaaccggttaaattttgtctacatttggacaaatttttgtctgattgtttaacttttttagaatgaaaaactacaacaagtttgattgttcaactcttcttctagcaaacgagggtttgaacatagttttgcaactcaacaaagaaactaactttctgcttgaacccatatcaagatgaattaattatattttcctgttttaatatgaatatagtaagtaagtagaaaaaacaagttattatcttctttaagaaggttattcttcagtatttatctaatctatagcatttatttgttggaatgtactttgtttaattccacgagcaaaatgaccaacaaagtttatttctttttttagttagcaaccgtcctagagtgattgttgttattttttgtcccaaggacttgtgttaggttttattttttaaattgtaagtcaattctttacaaaagccatagaactttagggttgtttttaaattgtcatttttagacatatcacgaaacttaggaataaaaatacctcatttcagttactaacagaaatattcctaaatactagtacaagaagatgctttggacaacaataaatcccataatctaaaaataaaaaacatgcttaaaaatagttcattgtatactatctattatagtcatttcattcaaccaccaattggcaaacaaaaaacaaaaagaaatgctctgttatcaagtcttgctactttaaaaagatacaaactttttatcaccctttgacctagtataaataaacaacatcataacaataggtcgaatataataataatcatctttttttcttgtttgtcttaaaattaaaccaaatagctatcattaaacgacattgtaaaagattttaaggattccacaaggtatacgtcattttttctagttcaatagtactcttgcatgtcttacatattgtgtatccgaaaaggagaaaaaatactccacctaaatggagaattttgaattttacaaattatattgttcttatactagatcagaaaaaagagaaaaaatcggaaataggaatatcacactaaaaagtctaattgagatccaaatctgccaggagaataattatattttagatctctatcataatagatgttctaatagaacaataataactttaaataataaattcttggttaacaaaagaacaattttactacatttgttgaatattataaaaaatattactacatgctaacgtcatataaggtgctgattcttgcaatacgaactaaaaaaagaaaaaaaattgttgatggttcttatagtgtataactttatataacttatgtacaaacagtaacaatgcaataaaaattctttacccctttttttaaattatacattcctattcgatcccacggtcactgccaaaaattttaatattctattgtgaatgaagtaataaattttgaacattctatagatcgatttactatagaatattgtgatatgtataaaagagatatagacaccaaataactaactaatcaggggcgatgatcctgtaagagtggggattctctaaaataattcaggggcaaaaattcaaaaatagaacacaaagagacatgtatatctatagtgtggttagaattgtctgtattgtctcttttcccacttgtgtaatttttttcttcacttttattctttttgtcgttgcatcaaatacaaagacaattgtttccaacacaatagcaaaaaggaaaaaaactatttgtccattcttaaacttgtaaactttcccttttatgttcttccaaagtaaaatatctagacaaaactaattctattgtcctgcaatgtgaaaatgtctaaacaataaacaatatttttaattctatatttggaaatgtttttgaggactcaacattttctgtttcctttttcgtttaaagaaatcactacaaagtgattctttttcctattagacataacagaataattgactacgctgtgtttttatgctttacttggatttttagtccaattgttgaagattacagatctttttcttcattctttgtttctactcctttacacacttttatcattgaagatttattgcaaaactttatttatatcttattctggttcagtcaaaaatttagaacctattagacgatcatttttattgcaagtcatgagcacatttttatataaaactaccatggattatgtctaaatattctttcgtttcttgcttctcttcttgcaggcatgagcatcatctcgttatactcccagatgctaccagtataaccgaactaagtgaatcacctcaaataaccaaaaaactaacgccataaagtatacgcactaaactatatattttactgaaaagttaataatttcggatatttgaaaataatataatggtctcaagtgccttatcattgtgcgcggcactgcttttagctgctttttctgctgtatcgaaggcacaaatagcttatgttacttctattgaatcatttcctacttattcggaaccgcaagtatcttatgccactagttatctcgaaccggttactcaaggtgagggtccttatgttacagtggacggactaatgtttaatgatccgtataatgcatctagagatgctagttgtttgttgactccagaacaacaggctgctgttttggaggcaactaataagttcagatctatgatggtcgacactcctaatgtgacctggaatgatgatttggcccaacgggctgcgtggtgggtttgcagtggtggtgttcacattgtaggagaccctccaagttacgactacgatattggttcaaacgcttacgcgggacctggtcctctaacccacggtgtagccagctggtttaatgaaatcgttttttataattacagcgatccttcctctcctaccgtttggtatcatgatggacattttacacagcttgtttggaaatcctccagggaagttggttgtgctgcacaagaatattctcccggtacttattatcttgtgtgtcagtacttacctgctggtaatgtacttggtcaattccctgaaaatgtcatgcctctgaaaccagcttattataaaactgttgatgctctctcaacacttgactggataaccaacgccgctgggtggagttctctgtctcaacatcaaaaaactcttactgtagctccaattactataactccgacatcaaatcctaaccctgtttacacaataccttttggagattggtcagacctctttccatcaacaacccagataacttatttaagtgccactgacacttcaactaccactacagcaacatctaactcgagcaacaatcatagttctgctattgatactactgacaagtcaactgtcacctctaataaatctacttcaaccaacagtcgtggttctgctattgatgctactaacagatcaactgccacttctaaaaaatgtacctcaagcaacaatcatagttctgttgttgatgctactgacagatcagctactactgcaacaacatctaccccaagcagcagtcgtggttctgctattgatgctactgaaagatcagccaccatttctaaaaaatctacctcaaataacagtaatgggtctagtgtcgatgccaccaacaagtcaacagccacttctaaaaaatctacctcgagtaacagttatagttctgctatagataccactgacagatcaaccatcacttctgagaaatctacttcaatcagtcatagttctgctatagataccactgacagatcaaccatcacttctaagaaatctacctcaatcagtcatagttctgctatggatgctactgacagatcatctaccacttctaaaaaatctacctcaatcagtaatggttctactatggatgctactaacagatcaactaccacttctaagaaatctacctcaatcagtcatggttctgctattgatgctactgaaagatcaaccaccacagcaacaacatctactgattatactaaatatgcgttgactccagaagaacaggctgctgttgttctcgcacacaataagttgagagctttgcatgtcgatactggtaatttgacctggtctaatactttagctgtatatgctgagaagtatgctgccgtttatgattgttcatctggtagacttgtgcactctcatggtccatacggtgaaaaccttgccctgggatttcctaatgcagtcgctgctgtggacgcctggtatagtgaaattgctcattataattacagccatcctggcttttccatggcaactggacattttacacaggttgtttggagatccaccaaggaggttggttgtgctgtaaaatattgtggcacctattaccgtgattatgttgtttgtgagtacgcacctcctggtaattatgaaggtgaattccctgaaaatgtcatgcctttgaaagcatctgtttcaagtagtacttccagtaaacctaagtcatcctctaccccttctgctacttcgaagaaatctatctcaagcaacagtaatggttctgctattgatgccactgacagatcaactaccactgcaacaatatctactttaaacagtcgtggttctgttattgatgctactgacagatcaactgacacttctaataaatctgcctctagcaacagccataattctgctattgatgctactaacagatcaactaccacctctaacaaatctactccaatcagtcgtggttctggtatcaatgctactgacagatcaaccatcacttctaagaaatctgcctcaaacagtcatagttctactatggatgctactaacagatcaatcatcacttctaagaaatccacttcaaagagtcatagttctgctattgatgctactgacagatcaacctccacttctaagaaatctacctcaatcagttatggttctgctgcgaatactactaacagatcaacctccacttctaagaaatctacctcaatcagttatggttctactattgatgctactgacagatctaccaccatttctaagaaatctacttcaatcagtcatgcttctgctatgaatactactgacagatcaatcatcacttccaagaaatctacttcaagtaacagtaatgattctgctatggatgctactgacagatcaactaccatttctaaaaaatctacctcaatcagtcatggttctactattgatgctactgacagatcaaccatcacttctaagaaatctgcctcaaacagtcatagttctactatggatgctactaacagatcaactaccacttctaaaaaatctgcctctagcaacagtcataattctactattgatgctactaacagatcaactaccacctctaacaaatctactccaatcagtcgtggttctggtatcaatgctactgacagatcaaccatcacttctaaaaactctgcctcaaacagtcatagttctactatggatgctactgacagatcaagtaccacttctaagaaatctacttcaagcaagagtaatggttctactatggatgctactaacagctcaaccatcacttttaagaaatctacttcaagcaaaagtaatggttctaatatcaatgctactaacagatcaaccaccacttccagcaaatctacttcaaacagtcgtggttctgctatggatactactgacagatcaaccatcacttctaaaaactctgcctcaatcagtcatagttctactattgatgctactgacagatcaacctccacttctaaaaaatctacctcaatcagtcatggttctgctatggatgccactggcagatcaaccatcacttctacctctagcaacagtcatggttctactatggatgctactaacagctcaaccatcacttttaagaaatctacttcaagcaaaagtaatggttctaatatcaatgctactaacagatcaaccaacacttccagcaaatctacttcaaacagtcgtggttctgctattgatgttactgacagatcgaccaccacttctaaaaactctgcctcaatcagtcatagttctactatggatgctactgacaagtcaattgccactgcaacaatatctacttcaaacagtcataattctgctatggatgctactgacagatcaacagccacttctaaaaaatctacttcaaacattcatggttctgctatggatgctactggcaagtcaaccaccacttctaaaaaatctacctcaagcaacagtcgtggttctgctatggatgctactggcaagtcaaccatcacctctaataaatctaccttgagctatggtaatagttctgctatggatgctactcacagatcaaccaccacttctaagaaatctacctcgagtaacagtcatagttctgctatggatgccactgacagatcagctactactgcaacaacatctaccctaagcaacagtaatggttctactattagtgccaatggtaatgcacatgctgctggtgaagctgcatctgctaaaacaaatgttgctcactccgtcacaaccgctactgttaagagcacacacatggtagatgttactgaatgtccaatttgctcactatccaccgctacctcttcgttttcttcccaaaacggtcaaactgccctacatggcgaaccagtattgagagttagcacagtttatactacagatggtgttgttatcactacatacactacttcatgtccagacagtgctaagacaggttctgtttcagcttctgctgctactgctactgcaccttcagacgtaagcatggaatctgcccattccaatgttgttccatctgtaggtgttgctacttcttcttctaattctgcggaaagtgttacagttgcaaaatatgaaggtttggcagctagtttgacctcagatgttctattcagcgctattttaatggctcttattcatttgatctaattatgatactgttttagagaggcatttgaacttgtactaataattggcagacgctgtaatatatcatttattgtgattgtctgatgttagtataaaaaaattacagcacctgttgattattagtacaagtacaaatgcctctcttttttatactaacctcggttttatttatttactttttgtataaaatattttttttaaatataatttatttacagaacacttttagttggtctaatttatttttacttaaaaatattgaatcttgtcctactactacgagcatggccttagtagtttacttcattctcatcatcatgatgccttcttttctttacctaaaaagcatgactacaggggttgtataagttattgaccttcttaaatacaactttatgcgtctcaaggacgatatttttttcatttcagttgtgaagaatacgtcactatctatatggaatccttcaatgctatcgtacacaccaaatatctgaagatcctactgaaatatatcaatgatcatatttgatactctaaagagacaatataaaacaatcaaactactccaatagatgtaaaaatgaaaagatctgtatctttgaatcaaatactgaatgggaaccctatatctaagagaactaagctgaatgagagtaaagtaaaaggaatatcgaaagacccagagactatcgaccttgtggaactacctgagcaggtagacctcgataacgttcaaacaaataaaccaaaaattattccacttggtgatactctatccagcgtcttggtgaagacatttctaatgaggaaaccaccaaagttactaaatattataggaatgtacttcctgggagtataattaattattaatctaatggtagtgtatattttaagtaagattgccaatatagcaagtaacaaatacacaccactgattattaacagcttattgtaaatctaactacgtattataagaatccaacttttagttatgatgtattgtgtgaaataaataatatcaaactgtcattatatatacttgaaatgtttacatctaattatatcctaagacttaataaaatatacaaaataatagaaatataatatacacccattagtttttaatatttcactttgtattatcttttccaaaaactatgtcattaaatattattcatttgtaagtattaatagtattatgtgaaaaattttggatgttgtaatatataaattatttaaacgcattaataaaggttggatttcatatttatttaatggtgaactaataaattttagaattctatttattatgatatagcaataaatattctagatatatataatattataaccataggtaagaaaagtctctctgttattttatttgtaaaataatatccactagcttttgccttattttctttttatttaattattagtatacttatcaaaactgttgaataataggcagataatcactacttttttatttaaaagtgatttttgtagatcattaaaacaactttttgaagaaaatatttcaagaaaaagaaatagtgaaggatcaatgtgtgtttgtttataaacaccatatatattttctgcatagtttttaataaaatggagatccaatttgtctaaggctcaagtaatagaaatgttagatataaaattcattattgtctaagataaaccaactatcttcaatactactgtgctaatcatcaattctatcatatgtgttaaaatataactccacataagttattgtctctatggaacctgatttaagtttaacttgctaaagttagcatcaatacaacactgccaatctttatcatttatcaaaatatttcagttgcaatagatgctaaagcctagaaattatttgcattcacttatttggcatttttaactataataacgtagtcgaatttaagattgcataatttcatggtaaatagtagttttgttttcgaatcttgcaatttcctttttgacatttatgcaactggcacaaatatgttgttttagactacttttgtgcatgacatcttgcctgttgttgtttggaacaaacattgagaaattttcctttaaacgaccacataatagcaaaataaaaattggttgagggcaaaacagaaatatctcactcacatgaaactttctacttgctttcatcgtaaaatgggctaatagatgtttccaaacaagcagaggtaattataatactataaacgttttaattatgaattttaattgtgatttgacatcaagggggaatatgctatagctattgttccaataattcatggtatttattgtttttgtttcaaatggattggaaaattctagtggataccaagtttgtaatttctttgaaaactaatatggtgttgttgagaagaatagccagtcaatacgtaagctaaagttttttaagacgatccatagtagataaagttgtttatgttaaatgttttattttcacttcgaaagaaatgcattttttcattacttcagcgcaagaaaaacagttttttttctgttgtttttgatcagaaaaatttggacattcatttttttaatcgtattagatgttgatgttattgcatcaatgtttttatgtagtattaggaagtgaatcatttcttctagtttggaatgtatgcaatccgcaacctataagaagtagttgattcattattgtataaatatttattatagttaacagaaataatgcccaaaacatactcattatgatatatacaaaatcttttgacccataggaatttagtataacaagagattgtcgtatcctgtattatataaaaaaaatgaagttcatagaaatgaaattgtaagttcaaattgatttatcccaagcatatttctaattagtattcaattaatagggaaaattgatacagtcatttatgagattcttttatattattacagttgaatatcagatatccagagatctttaaaaaaacaaaaaacacttctaacagatataagtaaacatcttttatattatgttataaagcatattgtcctaagaacatattttaattcattgaagagcaaaagctctaattctaatgataataagaaaatgtttacataactacgaaaccatcaaaattttcatgctttataaatttgaggaggtattagaagtattgttttagaaacatagtgaaaagcaaaaattaattacggtacagtatcttggagagacatagtaacgacgttaatatcggtgagtatatttattcttttagaggcaaaaagaaaattaaaacaattcaagtgtatattgctattgttattttaggaatactaaaaagatttaatagatttataacaaatcacaaaactgaataatactcagataaatgtaagttagctatatcttgaattgaatttggtgcttttacgtataatagagatgttttaataattactagcgactaaggatatttatttattagagtccttttcaagttttaattgccaagtatactaaggttaatttacacttaacagagatataggacatcaatattccttaaatttggtaattttcaaaattcaaagtaaaaatgttgttcctttcgtttaattgcttatttttaataacaaattttcatattgtagtatccaaattaccataaaatatttgtagttttatgttacaattgtaaaatttagtaagctatcatcttcaatatatggctcaaaagagattttatctttcaaatttattgttaaaatcactttttttccaagtgttaatttagcagtggagattactcgctgtaacttgtgtttattctgtatttgaatgattattcatgtgtaatattagaaatctctgctactttattgataatatcgccccattagtataaaatttatcttgaaaaaagttttcttgtgttttttattgcatataatgcctaagtgtatcactgactatttgaagacaatatcatattaatataattaatgataatatttgaaaatctaaaaaaaataaaatcgtctatatttacacagatgtattcttcagaaatattattgttatgataaattgttttgttatttcataattagcattgctataaaaaaggtatattcgacatatttgttgtatgtttgattgagtttctttatattattcataatgattgtgttttctaaggattttgacaaatccagaagattttagaatgatttattgaaaagcacaagcatgactactattattacaacagtcccacataacctgttttgatctatatgaaagaaaatcgaagacaggtatcctcggaaaacaaagtgttttgtagtaattgttggatgtctgtttcaaaaatataataatagaaaacactctatcattaaaacagatttggctagcaggggtcttaacaaaagtaattaattaggaagttttctgagatatttatttatgtttatttggtgttttattatctaacccatgtgaaattcaagattgaaaggactaatctctgtctcttcaaaagaaaaatggctacctacaacaggattccagtagttgtgtaatttaaggattttacatgtcccattaaagattttgctttcttttacaagtcgaaaaattttttttctctgactgcagatatttttcgtgagatttagctcgaaagccgttgacaatagagtaaaaattattatgacaaaaacactacggctttatcccaaaaagggaaatgtccattaaaaaaagcttagattttgttttgtttttccgaattcagtggatagaatttcttcgagatcgcattgttattcaaagttgcaaatatttgaaaaaagaagaactgttaaaaggagtcctaatggaggaagatagactaggtacgtaagtcttcctccttgttgtagcgtgtaacaatcctgtttaaggctagatggtagagttaacattacagaaaaaactcatccagtctttcgatacttcagtgtgtaggatagacacttttatagagggtttccagtacattttatggaaagtataaaatagaaatgagaagtattatgattaaaaaataatatgtgttaaaatataagaatttgtaggtagtagatgtttatagtatactatgtgaagtattcttttgagtgtatctttaaaatgattttaaaagagaagtactctgaactatatattggttaaaactaatataaacaagtggattttgttttatttttattggacagttgtatagaaaaacaaaagaaaatataatatttttgttaggctgtggtatttttactccttagatggttgtaggcagtagtgtataaggtggatgaagatggggtgacaatatcaacaacttctgaagacgaagaactgtcaccgttaacaagggtgatggtgtaggtagtgtcatattttaatcgattttttgacatagaagcaaatctagtctaacattactaaaattataagcaccagtctgaattaaagatttaaatcgtgtattatgaaaagttgtcttaatcttaagtctaaccattgaagaaaagcaaaatgaacaatatttacaaagaataccgtactttttttaagaaatgtattaactgtttcgtgcattctattcttattgtcgtttttttgagttttttttaccaattttaacctggtgagtgtatgatggtcgttatactcttcaatttttagggtagaaaaattattgagtaaatcttaactagtattttagaagatgattcaagataatgtgataggtattactaaaaatcaaactgttggtattgttataatataggctagtaaaaatatatatatatatagatgagaaagattgtttgtctcgaagatggaattttatattaggatcaagataagaaaacaaagtaataatttcacaaattccttttatagattgtaaatagttatttcctataaatattgttcatgatactctcagtttttttctattatataagaaggtaaaaaaatatacttgcaatttatgtatgaagggttatactaattaatcatggttatgatttttagtagcatcttaagtgcagatgctaatgctagaatttttcactatcttaatttttgatttcttaatttgagttcttcacaatggttagttgtattaaatttcgtaagaagctctatttggaatactgaaatgcgcagtctacaggtaacaccctatattaaggggaaagacttggggtagccaaaactttgaagccaagtcgtaagtgtatttgaacaaatgatcgtcaaattaacgttggtggcagattactgaaaatttcatttaagaaatctctgattgttgagagaatgtgccagaggtaattattagttttaaggttggtattctatcttctaaggtttgcccagaaaataaaataacttaagatcagtttaggtattcaagatcagccaaaaataatgagtttattagtttagaattgaccattatgtgatttgtaaacgtttatagatataattaatatctatatttttgtatattatttataagaatccttacaaatttttgtctggacttttttaatgattttcaaaaagtttgtataagaatgaaattaataactatacttaaatattatatatgcaaaaaacaaacaaaaaaaggaaggaaaagaaaaaatcaaatatagaacgacatataaatattaagagatgatagattcttataaaaattgtacaaagcagccgccaactatatattaatattgcttcatagatgttgacgcaaggcttcggaattaaaaattctagtagagttcattttagactaaaataataggaaaatgtaacttacaataggatattggtggtattataaattttattgatatttatagttgaaagctagcaatactataaattgttattgtattgcttggtcttttctttctacataactaatatacaagatacaatattatacagtatactccttttatcttcgaatcttctttaatataaatttttataacttacatggatgtattaatttttattgtagcaatgttaatggacattatttactctactcatatcccaatcatctgataattttgttactctttgttagacatagcaacataaatcttgaaatgaattacaaccttaaacattttgtataataaataatataaataaactctgaatatgtataataacttattaattattatactaggactgttttgttatctactctaaaatgtgtgctatcttggatcttaactgtaatattaccaatatgaatataagtattagaacaagaacataactaacatgtttcaaactatctaatctgttataaatgatctaacaactcttccaataatgtatctataattatattctacattataaacatcacactagtagattattaattgtattaatttaacagaattatttgtgatactacaattcattatattaaaatgatctctttgattatcccaatactaatataacactatgacaatgagatagaaaaagatgataatctatatgagtaataactaaattcactactattacttactaaagatatttttggtgttatcaatattattaattatttatatctcaaccaagaaaactatcattatttagaatacttttatactaataaaataaatttatatattactacggttgtttaatcatcaagtaacatatcaataaatattattacagctatactaaataacatcttactatttaagaactcaaacatttctgaattatgtaatacactaacttaaattgttgtctatttctcattttttatctttttcaatctgaatcaattttaaaaatggtcatatagctattctagaattaaggtttattgaattttaatagattaattctttatgtgaacaacaatcatctcataaagacagataatagtgaaacaagagaagaaaattaaagaaaattatggtatgtctatataatcaccactttatttatatttcctttttttgtgtttttatatataaatttctaatacctttgatgtaatacattacgttgttttagctgtattttttgctgaaataaaagcattttgaacatccaaaatttgaaggtgttgttcatatcctatttatagtaatattgcgaccaatacttccctatattttattatttttttcttttttgaatggtgcagctacattatatctttttccatgaataacttgaaaaaaaataaaaacaacgttattataagaacatgctcctaaatattactaaaacttgtggagaatgtggatatttaaagctgtagttatataaaaataatgaagaaattaaaaaaaaaaagagttattataaattctctaaaaaaatattttctatttatatttcatatattaatcataatgactcaatagtaatctatgagtgacaataataaaatttatcaattatctaacctgtatctgtataagtacactcaaaaacatgctttgtttatattagattttacatattgattatgagtacttagttacgaagtcttatatatttaaatactattcctttaattcctatatttagatgatctggaatatgattactccagtaatgtttgatgtcaaaacaactgccaatagtacgcgttaggttttgagaatattagtgacgatcattggataattcaaatagggaaaattctacttcaatttttatgtaaagagactcttgattcattgaggtaactgttagaggtaatcgtccatatttaattgatatgtaattagttctgcataatacatacaaatgaagtagatagcttaagtaggagatcaatataggatctaattccaacaatgaataccttcgtagataaaaactttaacaaaaaattaacgtgtatttatttttaatatcatatatgtatctttttaccccctgttatatagcttatactactttttgatccagatcagacccattctcagatacatttttttttcattaatggttttttcttccaaaagttgtcccactttatttcttttttttatgtaaacgacattcattatctagagcttagtttgtcaatgccttattctcttttctacctttttgaatttccttcacaaggtctattacatacttaattaccataccaatatatcaaaatcactttctgttatcattttttcaattcatacataatatttttttatttttttgattgaggacgtatcaatctaccaagaatatatgtgccttatttcacagcagtggaaataattgggtcgaatgtttcattgagaaggagtttgggctctgatctaaagtaaatgtctaaagaacaacttttttacctttttaaagataaacttttttatttgatagaaaaagtttggagaaactacggttgacagtgtcttaaaaaattatgtattatttgtctccttgttttcctcgtttttgaaatattttccaaagacaagatctagataagtggagcgtcccactatcagatcatacatttgttagcaaaataaagagataactctggttcattatattatgtatttattcttacactagatgttccattcgaattcataaaaaatattaagattgaacggaatcaggaatctgttttattgattgtttttggagttagctatgttattaatgcaaatttaacccactttattgagcaaaactattatgattaaagataaggtggctatccaatttaagattgatatgaaatgtccagcaaaattctcttcaaaagagaaaagttctttttttttttttcattacaatcttgtgatattgatgggtaatatatttatgattttccttaacatctgaatgtttaagctaattagattggtgaccatctacttatttcctttatcttttaaaagacttcaaagacagatattttacgatacaaccattatagtgtacaagaactctgatcgccaagaaagatgagattactaggaaggtttttcattttattaaaagccatgattgcagtcaaagtaggtgtcgaaaaacagcaagtttgtaataataatggatgatgtgttcagcctacagatataactcttcaaaatatcccattgtgttctttgaatagtacattaccatgtttttctaaaggcaagagtattatttcatactttgacaagggaggctcttttttacaaaaaagaatatggtgtcaaaccctttattcgctaatagctactacttaaggtgctgctgctaaatggggaaagttagttgaccattgtgctaactgttcaccgaatgaggaaggttgctatggtggattaaattgtgttattactggtgttgttactgttttagctactgcttatgctatcggcacatatgtccagtttgctacaatgtttatgaagagagacaaagatttatcggcattaccacctttccaatactttgatggttcacttgaactaatcttcgatgaagatgataaattatctaaaagggatggtacaaattgttcctggtataatggtactgctaccgcaaatagtattcctatgtgaaggttggacatgtcttcagatggattaaataataaagttaagctattatttataaggagagacactaactcagaaaatacatcaaaacaaaagagggattagcacgatgtaaatcatggacatgattcagcaggaggtttcaactacaactattgttttctgcatcctgaacaccatttaactattcaatatgattggaatgatatcttgggtgcagtggattcacatattggtgacatggttgcacattacgatatcaattttggtgatgttgacatgaatgatacagttgaagggggctggaaggtcttaatgggaactggtaaactagttgttgaaagttctacttcttttggtagtaactttgaaacatgtgatagagacacgtttgatggacttgccaaataaaaaatgctacgttgctaatttaattgttactatattctttcttattaatatcgtaatgatagccttctcataaactcttctctaagtgtgtattaacaaggttgtgtacttttaaagcttgacactaacctgctatttttaagttatacaaaattagatcatataaagtttttgtatatataatatactaaaattcgggtatacaagataatctggaaagttttattccagcagcctgtggaattttccctaagtctaatttggaaaggttcccaatgtcgttccatgtgaaatattttgtagtcttatctgaggttcaaaaagtatcgatcccctgagaaaatataacaaaaaaaaaaataaaagttcgaaaacagatttatgcacgacaccgacaataatatatattatttagtttgagtagatcaaagacatatataaatacatattagtgttatatctaaaaatataaattttgtttatactctatatctatttaagtgaattattgttactgttgcacctaagctacttatcatcaaaaactcataaccataagattatcacattttttggtattttgggtttccccaactactacagttatttggaattatggctagtaagagattttttggatttccttacattatatagatttcatatataactcagacagaaaaatgatatgaagataaaataacgattattcaagcttagatgctctgtttttctctagaaatatcataagaagatgcgcctagggtgtgattgaaactagtgatcatgattaaataatgaagttattggtatatttattgttacaattcgtcagcctcttctctacaaactataaaaacaaatatatatatatatatatataataaaattacttaaaatgttcagagagaaattgtacatttatttctccttccttttgttcttgttccttatataatttcatatttggaataaataacccacacttttgtatttatccataaatatatatttagccctctattggatctggattcaaaataatcttcagtaagcaaaaattctctccactgcaaattaactttttaatttcccttaacatcgtaatcttccaggtaggcttaatattattaagatctgtaaaattgttaaagcaattagctgattgaaaagtctgggtacataagattgaaccatattttctttaactatacgtaaaccatgatctaatctcatgcatgtgaatcctttaagttgtccaagttttagtgatttaaaataggactcaattaagatattagtcatttaagggatataaaccttgtttacccaggaatataaggacaactggtatggatttacctatcccttaataagatattggaaatatcttatttttttatcaaccaacacatatttgtacaattcaaatagtagttttttaaaaaatttttcagcagactttttgtattttagtgtgatatcttttgaaccaggtggtgatgtcttaactgcataaaaaatggaggctatctagcagctctggtcatagttttgactgctttggttgtaatttattcaaaggttcttttttcctttgttgaatcagcatcaagttggttgaactattccttatcaaaccatcaatagtcaaataaaaaattgtataaggtcctgctactttggggcattaatttatttattttttttgtcctttatggctttcttcaaatgttataaacaaaagtgaatgcattgtggtcctaatctcttaatctttggaatagcagcaataattctcctgtccatgtcgattgtaataaattcgaaactgtaccctaaattggtggttttttcaagaaattcttttattaaacaccttgggacttcatttagaggaacgaatagagctactaatgggtatccgccgccttgataatcacctacaataacatgacattgtcttaatgcgctactaagatgaaaagtatgttaattgtagcagatttgaaaattgtctcaataatatgaccataatcgtaataaatagtgtcatagtcgatatttagagtttccataaaaatttcgatcgattttaactgcttaatattagacaaacaattaccttaataataatttacagctatatagccctcaataatactttacaacctaaaagttggttggtattttttttctatatcttggaaaaacattcaaaccataattttttgcagtataaagatcggaacaactttacccagtttggttttgaataaatgtttctaacccttcaggtattggaataatattaggtttaggataatgcatgtcatggatcaatacaactttaataaaattataattcttgataaattaaacttggcgtttagagttacactgaaacgtttttaggtataaggatttatcagaacatttgtcatcaccgcgtttagctttattttggtttcagttgtctatagcgcttgttaatttcttggtattcttgctgcagacagaatagtcaaacacatatcattgacttcttagatctaaaatattaccaataatcatagtgataatatttctgaattctgtattaaaagaatatagagacaattcaatggtcatataaggaccttcagcaataatattgtatttttaagttattattaagcttgattacttttaacatatataataaggtttgcaataaacgaatttcaaatccattgaatttcatgaaataatactttttggtgtcaaaagaaaagttgattgaaggtcctaaaaggtcatcatatttttcatatttagaactcttagttttttttttttgatcttgaaaatttgtaaatcttcatcacaatgtaaatgacattcttctaattcttctaactctttgtgatattgattctctctattctcttacttttgaacatcctcaaattcatcaaggtgtaaattttcgaaatcagaaaggtcttcaaaatcttttgattgaaatcttgtgcattactgaaacaggtaaagatactacatcaactaaaataaagccaaaatttatgtattccaaaattcaattatactgttaccaggtataattatgacatccaacattattatttcactcttttaaagtgacacatcctattatctcaaagtagtttaatatataatttgtagtgaaacatgggattcctctgaaaaggaattacttgtatactagtgaactctagctaaatgtataaaacgataagtaatatcattacaaagttatgtttttaagcattaagcattacaacgatatataaacactattactaactatttccatacaaccggtcttgttttaagaaatagcatattttcattttgcggaaaattttaaatcaggtcttgtcataaaaaaaattgattcattaaaatatctattctttaacgaatatggcagcagcacccatgcctgttccaatacacattgagaccactccaatttgaccagttgccatttcatttaaaattgtggcaacttgtcttgcaccggtgcaaccaagtggatgacctagagctatagaacctccacgtgggttaaccttttccattgggatctttaatttattgatacagaagacacactgtgctgcaaacgcctcatttatttcaaagacatctatgtcattaatcaataatttaacctgttctaaaactttagggattgcaaaagctgggcccactcccattacttcaggtggaacaccaacacattggaaagctatatattttcccaatattggaattcccagtttatttgctaatgatcttctcattaaaagaaccccggctgcaccatctgagacctgagatgagtttccagctgtggtagttcctttgtcttttataaaagctggttttaatatggaaagagagtcttttgtgacatttggtcttgggccttcatctttagaaaaccacttagtatttttttcggtttcattttcatcatcttcacttggcaatgggataggcaaaatttcatttttaaataaactattatctagagcaacttgagctttttggtaagattcagcagcaaacttatcttgaatctcacgatcgataccccattgtttagcaatattttcgtttgtgaaacccattggtattaaacatttccgggccattggattagccttcaaagaatcagagatgtcacccaaagcgttgatatttttataatttttagacattgattcgcaacctaaggcaagaccacaatcgatttgaccagttagtattttatttgcgatatcatttacagccgtcagacccgaagaacattgtctattgattgaattaaaggggatgtcgtaggggaaaccagcagccagagcagcagcacgatgttctgtagcgccagctcctacgtttagtacatttccgcaagtaatatcttgaatttgttttagatcattttgtaaagtttctggtaaatgctgaataaattgtagcaagaattgcaagagaatatagtccgtatttacatcttttaatgaacctttaaatccacgtgcgatggctgttcgatgggcagatacgatgactacatcatgtggatgtttacttttcacctgttttatagaaggctcttcaaaaagactattttgtaaatgttccttaatattatttagtctttgagtcatccttgtaattttttttatatattagtgtatttgtgtgtgtatttacttctgtatatttgagaaaagttatgtagacagaaaaagataagggaactaatgatcaagagagaataaaatgaaaaaaaaagacattttcatgtaccgtaagtaatacatatatatagtagattggaatggttggttgcttttattgtaagtcttttttttttaatttttttcttttgaatagccgctgagataaaggggaaagagagaggggacagcgggaggggatttaaccgtcagccatgggttggtccccttatttaatatttttttggctgtttagtttgatttgtgcatatacgatatataattcttgtgaatacaataggattccaaaacaaagcaaaacaaagcaaaacaaaacaaaacaaaacaaaacaaaagaagtggcaacagtgctagaagaaaaagggatgataaagcaaatgtgcgtctactagtaattgttattagtaatgtctttgtgtctggttggagccgctagacggcggttaatgttcttgcatgtgttttataataacaataataatagtaaaagccctagcccctttgtccaacttccacgtgcaaacgtgtaattgttctaagagatgtgattgttatttctttttgttaacttctatcattgcgctttgctctaaataatagtatattattcacacgcacacacacacacatatatatatatatatatattgtttataggagaaggaagagagcaaaaggcccgggaccctttaactgttgtgttgctctttgttacacgtgttgtcacacgtatttatttatttatttatttatttatttatttatttgtctacttattgcagttgcagttgttgtttcttttcctctttgacaactgtttagcggaaatatggcggttagcttacggaattccgacaattccgtcgtgtttcaattgattgatttattcatttattcatttagaaacgcgaaaactcgaggctcaagacatccgaaaccataacaaaaaaaaataaaaaaaaaaaaacagacattcgggccaaagaagaaggaggaggagaggaaaaatagaaaatagaaaatagaaaaaaaatttttttttctattttctcttcccaagaaaatttgaacaacacaaaacacaattaaaaacaaacaaataaaaaaacaaaacaaagaatgaaatgtacaaaaagggtaaagacaaacaaaaacacaaagtaatttgtttgtttgcttgtttgatctgatctatctattttagtaattgactatgttctttttttttttatttttttattttatttttgcttttactttatttttacttgttttcctttttctctatctatttttatcaaattgcagaaaaaaaaacaatcaaagaatcctaaagtgagacaagactacctttaacctttaaagttgacttatccatacactcgagaatcagacagacgtagtcttcgagaaatccaactttaagaaattatattgatatcaagttgtctttatttgaattaaagtcaagtcaggcaaatatacatatatctatctgtctatctatcaatctatatgtatgtatgtatgtatgcatatatatatatacaggacaatagggagaaaaaaaatagaaactaaaacgaaaatagaactctggcacttgttttttttttttgttctagagtaatgggttccgtatctacttctgttggatgcgctgtaggtatacctataggtgttggtataattattgctttcgcattctggtatagattacaaagaagatttaaaaaggaactagaagacgacaaggatttagaacatgaaatttatgatgatactgcatatatatcttttaataatttggactccctgaaaaaagatactcaacaaagtaataataataataataataatctagatataacgttggatgatgatgatgatgatgatgatgataataatagcataatacatgatcataataataatagtaataataataataatatcaaaaagaatagacctaaaaataatatgtatattcctgcatatagaagaaaaatcaattctttacatcatcaaagcatacgcatgataaataataagagcagtagtaataacccgtatagcacaaatatagagtctgaaaatactataaatattccacctcctattttatccaggtcttctctgaaatcaccttctttacaaaatattcatgatccacaacaacaacaacaagttagacaaatcagtacctacgatcaaatggtcccattggttaatccatcttcaatcttcgattctaaaaataatataaacgatcatatctccttccaatctgactcaacctataaaaatgattcctttaatattcgtagtttacaataccaagatttgggttcatactatcctgcagtcccaaattcaacaaacaactccatacagaattataagtttaatctttccacctcatccttaaataatagtaccaacatttttagcactccaaattctaaaaaaaatcatgtcaatactatccatgcaaatgaagataattcgaaaattatggattccacacaaaatgatgttgaatcggattacatactgaaaaataattatgatattaatgacagtgagagtaaaatagtagaagaagatcagtacgaaaatgaatttactaattataaagaaaacagaagacaatttttagatagtttgaggccaactaatatagaataataattgttcttctttgtacccttttctgctttcttccactacctatatatgtatatatatattgagttattcatatgacttattagatacccataattgtacgattagaaagtatatactcttcctgtttccttctgttttttttttgttttttctacgtttctatttgaatgccagtaactaacttggatttaatggtaataatggatcaatgtattcattgtcactactatgagaaggatgactgctttcagtttttgtatgggaattattattcgtgctataattgaataaagacttgattgtagtattcttatccttatcatgttctggtgattggtttttaatactattttcattttcattcttgcttgaagaattatttgctaaagatcttaatgtttcccaaaaatccaagccatcctcataaacgtttggtgatgaagatagtactgatttgttgtcgccaagatcattgtttttatcactcttatcattatcattattattgtaatccgttgtagaattaatggttttggtatcgtcgtttagatccatcttggcacgttttcttttattactattcctcacagtatttggatttaccaatatgtgagatgaaccatgacttgccactctttctcctagatcgcttatttttgcgtttttgttgtgacgatgaacttgttgatcctggtgatgatgaagacttatgagacccgccattaatagacctagggcttggatttaataatgtgctcaaacttgcattacggctagatcgattctgtgaatctgaggattctaaccgaggacgtatagtggggggtaaataattgaaatgtgaactacgatttgttatattttcactgacaactacattgccaccaactgtcagactaaatgaggaggcatctgaacttgatgtgggaaactgttgcgtttgtacagatgttggagtaacttcatatccagaactgaaatatattgtgtcgttatcattctctgtggaaaaggttttattgctggtaaggttggtattactaccattattcatgtcaacattatcattagtaatgattgttgatgtaatatttgtatttaggttatcatgcacaggattggtcaattgataaggcatgtcattgacaacgttatttccaataaatgaagaagaagtaagatttttatccaactgtggtgaaagtggaccagcattcggtattccagttagattttctttataatctatttgtactgaattatctttattattatatgtgtttgatagtaaactaacttgaggagaagtggtatcaattgcaaaattagaatttggtctttggattaaatcttgaaaaacagaatttggtacttgagatagattcgtggaagatgcagaaggtgatgtataagatgcagacacgtcttgatttttctgattatgcgctagtaatcgatctggatgcaatggaatgtcattttgtttagaataggaggagcttgtgtcataatggtgatggatatgttgatgtagcgaaattttaagagagtattttttggctttctgtattaaatcttcaaccaactctgatgtggctatagtaccatttgaaatagatagccctttcccatcctttaagacaaatttccattctgtttgtgacacatatgagagtggttttgttgactttttattatctttaatggaggtactagtagaagcaacatttgatattatatctgaggttctgttcgtagacaagtattcagcccctgtgtggttattactgttgttattatatgctaatttattatgtgatgcggagttattagacagttgggaatgtatacctgtattcaattccacttctgaagtatttagtggcggtgcggaggtaatgccatttaatgcaaggtttcttagatcggttacagatctagcgttattttgcaaaactcttgaatgtggtgataagggaggtaacgaattggtcagtcgtgatagtggtggggtagtagtggatggtgacgttgttgtatacggaattttggacaatactgtatttttcaaacttgtagtagtagatgaaagaccagcagtataatcatacatttgtcttacgtctgttgtttgtttctttctgttacttgtattggattcaatctttattttctgtaaattattttcatcgtatatgggtgttctatcattactgttattgttgctttcacgtattagtttttttaaatctaaatctttattctcataaacagcattaacgataacatcaggagcttgtcctctaattactgtcgtaatgatctttctccatctgtttcgacatgttaaacttggcctagaatccatttctttacagatacatctccatctagttccatattgcttcactttactaatcaataataaatcctcttcttgagtccattctcttaatctttctttactagatggatctaggacttcgacatatcttttagcacattgatcctcagttctaccttcgatttccatggcaacagccatccaatgtgcaccatgtttttcgtatgatttcaacaacaactcatcttcctcttttgtccatcttccctttttcacgtttggatttaacgaaccagtccaacgtttcttcagatccttaggatttctcgatttattactaaacttggaacatattacatcccattgtaacaatttaacaatttttgatgattcttgtatagacttgatgtccaaaataccgtttttataaccaacttgtttcaaagcatcattaattaaggctatcaattcttgatcatcttctttggaccacgcctttcggctgcttctgcggtgagtctgataccctaaagaagcagttacatccaataaatcaaatgtatcattttttcttatattattgctactgctgtcattatgattatcatcagtactagtatttattctggaagtagatttgttttgctgagacatactaaagtagtcctttgtgataactgtaacaccgataatatattttctttaaagtagaatattattttggctaactataatgcaattttcgaagattagtagtatgggttagtggatgagtaatttaacagatggtcgaacttaaaaaaaaaaaaaaaaaaaagaatgatactaatgaggagaacaaaaatatatgaaatatgctaaaattaaaaattaaaaaatgtgatttacagaataaaaagatgataattcagagttatgtggttgttaacaatactactttatttgactctatgtgagtacaattattaaatgcatgaagtcctaaaacctccagttcaataattttgtttacttctaaatacttaatttgaagctcatcgcaaatttgaaaacttttttgtaaggaagaaaaaaaaaaagatggaaaaacgaaaaacaattccgcgaaaaggcatatcttgcggaaataattccggttaatagcatatgtttgaattaattctactaccctaatatagatggaaaactaaaaatgtgtcacagtcaaaaaatgactgtcacctcgagatcgacatttcaagtaaccagttttgctttcactaatattattgttgtaatcttttgatatggtattgaatattaaatactttgtatacacgtatattatctagtattacataggtacataactaagataaaagaaaaaaagaagaatataagcaagcatttctatttctctttttttgtttttatttattggaatataaatagtcgagaataaattacaagagtgaagattttattcataattgtggaccagcagctaaaacatcgctagtagccttatcttgataagtcttgaagttttcaatgaataaaccagctaatttgctgacagcagcaacatatttggcttcaccttgtgaccagtttctagccggattcaataactcagacggaatgttgttaacgtgagttgggacttgtaagttgaaaactggtaaaaattcgtaggattctttagctaaagtgccatcatggatagcatcaagaatagctctagtgtattttaatggacaacgtttaccaccagacacataagaagcaccagtccaaccagtattgattaaccatgcatcagctttgtgttcagacatcttagaagcaagcatcttggcatatctgattgggtgtaatgccaaaaatggctggccaaaacaggaggagaaagttggttccggttcagtgacgccttgctcagtaccagccatcttagaggtgtaaccagaaatgaaatgatacataacttgttctggggataacttagaaactggaggcaaaacaccagacgcatcacaagtcaataaaataatgttttttggatgtgcattagctaagcatgggatcttagcacttggaatgtactcaatcggataggcacatcttgtgttttcagtaatagaagagtcagagtaattaacaacacgagtctccgggtcatagacaacattttccaagacagaaccaaacctgatagcgttaaagatttctggttccttttccatggataaatcgatacatttagcgtaacaaccaccttcaatgttgaatacaccatcatcagaccaacaatgttcatcatcaccaatcaatagtctgtttggatcagcagacaaggtagtcttaccagtaccgcttaagccaaaaaataatgttacgtcaccattgtcaataccttggttagcagagctgtgtaaagttaaaacattgtggtggacaggcatcaaataaaacataacagtgaaaatacctttcttcatttcgccagcatattcagtacctaggataaccatttccatagctttaaaattaatttcaatagtagtctttgaagtcatatcctgagtatgtgtgttagcagggaactgaccagcattccagacagtgaaatctggttcaccaaaattcttcaattcttcttctgttggtctgatcaacatgtttgtcataaacaaagcatgataggctctggcacatacaacacggactttgatcctgtatttaggatcccaaccagcaaatgcatcaacgatgtaaagatggtctctagttcttaagtagtcagcagctctttctctgttaatctcccacgttctttcagaacatggtttattgactggtccccaccaaacattatctttagaggtttcttcttcaacaattctcttatcttttggagatctcccagtcttttcaccagagtaagcaatcaaagcaccagaagcatcaataacagtattacgttcttttagggcatcttcataaaggattgcagctggagcgttacgtctaatagtgataacacctttatctaattttagttcttctctgattctttgttcaacagttaaaggagagggattaatggaattaacaactttggatggcatttcttttcttaagtttggtgttaattactgacagtattattaatgaatatgtgtaagtgtatgaatataacaaaaatgaaaccaataaaaaaaagagagatattaaaacaatatatagagcaaaatggaagaaaactttttttttctatggagagaacaacttgtaagttattattaattaaacaatggatataattgtgttatttgtcgttgttcgttttttttctatgtttttggtatacttgcgatcaattatatttgacagcaacaaacatacaagaccaggaacctagagagaaaggtaaagtatgtcagatcttcaaagagattccatttcgaacatatccttcatgtctttatatatgttttttttcctcttctatttggacatattgctttaaggggtgtttacccaaaggtattagaaaagaggatagtatattgttgataatgtttaagagacacaatagcaagcagcctattgtagcacttatttcagctgcatctgcataaaaaccctttctctttgtccttctctttgtctttttttttgttcttttgtctttgattctattcttttatttatttatttatttacttctatggctctccacactagaataatagaaataaaagtaataatggcaatggcattttcaataataatgccacttccaattctaattctaccacaactactatcaattataatactgatactaataataatgcaaacaactgtaataatagcagtggcaatctcgaagggccaaaataaataaataaataaataaaaaccagattgtttccatcataaattccatttatccgagacgaaactccgaagaaaattttgagtcaatgtgatcacgtgatatgttagggtcaagaatttatctgctaaaaaaaaaaagaaagaaagcaagaaaaaaagaaatattacaatgcaaatataagtagacgcacgcattatacaattagatatcgtaagccaatcaatcctatggtatctgtttttagaaacaatcaacacagggggaagaaacacaggttagtagcctttattattaccatcattgttattgttattgttattgttttttttttactctgagtttaaacgttttgagattaatcttacagtattatttttgttttatcttttctgttctattccttagctaatagtgttacctattaaacttcctaattcaagtcggtggagaagaaacaaaaaagttatatttcttatatccttcagttgaaattacaatgaatatttattgctgtgttgtgcgtaattgattgatgtattagtttatttatttacttatttatttctatatttacggtaatggtggaaaattcatgaaaatctatcaattaaacaatgtaattttgttattgttatggtttttgtttttgtttttttttttttttattttaaaatttaaaagccaaaataaaatctttatgaaaagcaaataatttcttatattacgtaattcatagctgtctgttctaattgtttgttttttttcatgataatgtttttttaattggtgcaaatatcaagatccatccctaatttactacagatagtaaaaataaaatcagtactaaacgtcttaatattttgatcttgagcctttcttttcatattttgatcgtttgtgaccagtactatgtattgaaaccttttcattctattattattagtagtagtaatggtagtcgtagcagtagaaccattgttgccattgctagttatagtattgtcaccattatcgttttccaaacttccagcattacttggtgtcatatttgtaatatcgtcttcattaacaatcgaacccattgttgttgaagaaggcgtgccactatgcataataacactattattacaagcaaatgagtcaaaattgcctagtgagtttaatagcacatcaccattaagatcgctgtaacaacccatattattacttctatttgatgtgaacttattctgtgcttttaccacagcttcaattacaaattcgtccacatgtgacctccaagttatttgttcctcaaactccaagtgttcttcaatgtctgttgcaacattacctgtaaatctcaatggtagtaatttaccttctgcatataactgtcgtatagtaataacagctcttgatgcagcttctaccacattctcatccttagattttcttaaaaaccttaattcttgaaaagttgttaagcacactgcaaattttaaaatttcatttgtggctaatttgtagatgtgtgcaaaatgtcttaaccatgaagtagcatcaaacacaaaatatgtaatgtccctattgatttcatcatacggagtccgccaaatattgttagctctaaattgttctccagtacttttgtttataaaaatattactactcctataatccatataatatttaaataaatcattttcatttatctcatttatgtgttttgtaatcattatatcatttaaactattgaaattagtatttttgtcgtagataccataattaatatcattatcactattactattactattattatctcctgtcatactaacattgtcttttgtttggttaagatttgtgtttgttcttatattattggaatttgaagtctgtaactggtcagatatccatgatgtatagattgatgaaccaataaattcaccattcttatcataggaattaaaatctggtgacaatttacggtagccggcgtattcaaatatattttctcctggtattaaactcaattcaggaatagaattaacatctgcattaatatcatccactttttcacacatagggatgaattcattaaatctggttgatgtaggttcattgtatggttccaatttaaaagaaaattgtcttaaaatatgactatccttaacatcatttctgttacagaatactggggtattgtaattgactttcaatccaaaatcaaaattctctgcaatacctttaaacaaaaatataattctaattgcacgtctccaaaatttttcacctgtctcatcactggaatcaaatccaataccatcgattggaaaatctaaaaacatatgatcattgatcccaaatcctcttaaagtatcactagtgatagcatgtttgtcacatataacatcaaaccacaacgtaccccaacatttccaaatttctggtaaatcttcattttcattgaaatattctaacaattcttctagagaatgttgagagtatgcatttgaaagtttttcaataagatgtgattcataaaaattatctaaaatatatgctaacaaaacatttaagaagcttgttattgtattccaaggaaatatcctcttcattaaaattttccaaaatttgtagcttttttcatcatttaaggatttgatctttaaccctgatgctataataaaatatgtccatggtaaaagatgcggcaaagtaataacaaaaggtgcatgtaaaaacttcttcaatacaatcatagaacatcttaaagaagtcatattgatgtaatctaaggatttgatccatgtacaaatatcaggatcttcaataggatattttaaagattccacattttctaagtaactaatgccagatagattatttgctgaagaattgtagatatcttcattgatatcattatcagtagtggtagtagctaatgttgtggtgcttccgttggaaacttcaccgtttgatgatgatgatttggatttatttttttcctttttatcttttctctctttcaaatattttggtaagtcaaacaataatgcgaatggattctttggatcgccaaaccctattaactgcaaaatatgggactcagcaaatgcaggagcatgacgaaagaaaaatcttagagaagctggtggctgacaaaacatattcttattattgaaaatattattgtcgttgaaatcaataccaaatctatcttggaaataatttaaaacaacttgctgcagatcactgcttcccaagaaacttggtagcaacatcacttcgctgtgtttcaaataatcgattaaatcagcatttctataacttcctgtgctacttctctctacaaatgtacgctgataaatattatcaataactaattgcatatattgctgtgatggagtaaaagtatcttgacaaaatacacttttacctaggtttacaaatgcttctaaagtgttttgttggacagtggacatatgataatataattttccatgaccataaataaatttcatagcctccatataccaatattcagcacttagtttccaatcaataaaacctgacgggtataaagcaatagccattcttgaaagatcacctaatcgttgcagccactggatagcatgcttctgtggtatatcaatcaatatagcggataatgaaataaatacatgtgtgataaattgggcacatacttcaggatccataaaatttgaaaaattttttaatacatctaaaaatgttatagtaccgtatacccataatcttctttcaattctataaatttctacaatttcttcacctattaatgtatcctgcggagactgtgaaggtaataatgcagtagtgataaaagttgtgtaattattaattagatccgtgttaattctataaattgtccataaatttttcaactctgtagtatgtgaagtagttaactgagaacaacgttcttgtaattcaatttcctgtctaacaataaccttatagatttcttgtaacttttgaactaaggcttggcttgactttttgttttttgaattatcattattgtcgttattgctatttggattaccattattactattgttattgttattgttgttattactgttgtgattaccattttgactaggtacattattgtatctttcagatgtatcattatcctgatttatgtttgaattgtcttgattattattattatagtcataagaataactatagtctcctgaaatattattgttgttgttaacattttgttgggcatattcttgcggtataggcttattattattgttgtcattatcatttactatgttattttgttttgtatcgttattaattactcgactggcattggaattatcaataaatgtaggcttgttagaatttgttaattcagtaattgtcaaataattgtgatgctctaatggggtatttgcagtttgctgctttaacatttcactaatccttgtatcactgttaattaaattattatgatttgttgtggtagtattatctatgttaccattcttataattttttaaatttgtgtaggaattatttgtgatataatacggtgaatgaccttgttcagagaatcctaacgaaggttgtggtgtttctacactatttttattaatactttcttttcttaagacattgataggagtgttcataataggtaaagatggctgctcacttgaaatgaaatttgtacttgtatttttgctaatatgagggtcgtttttattggtgatgttggtattatttgttaactcaggatattttgaaacattttgaaaaaatggagtatttataggtaaagtattatttccattcttaatcttataaggattattgatatatgtattatagttgtaattaacaaaatcatgatcattagttattcgctttttatgaaaattaaagtcttggatattataagaagtagagacatgtcttttctgtctagtagtggtattattattactattgttattacgattattattattattattattattattattgatattagaattatttaaattagaagcggtagaaattatatttttacctattgtagaagaatcaggaacattaaactcagaagtagtattcattataccattaattaaattatgattattagtaatattaaaatagggactgattgctaattgaggcattatcaatattgttgagaacagaagaaaattatgtgtgtaaaaaggtataaattagataggttttatatttatatgtgtacaaaaatggtagaagatacggtatggataaatggtcaatgtgtgaacaaagaaaagtgaatatcaataatgtaaaataaggattgtagcgaggtaaaataaactagtaggtaaaaaaacaaaaaaaaatggataactatggagtatttttaatgatcctctagtaataaatttaattgtttaagtagttgtttctccctttctttttgtataattgttgagtcacctatgtccaattctataaatatgaggaaatgatggaatctgttaatagaataaaaacagggaaaaaaagaaaagaaaagaaagatgcactttgtgtacgtctggtttccttggatataattcggccttttgttatatgagccaaatatttgataagttgttctttcttgttcactattattattactgttgttgtgttgtaaagattgatctaatatatatacaaagaacacagaagtaagtgaactccacaaagcaaaatggtttatagcaaaaaagcaaatgtatgctgttgttatcgttgttgttgtcccttcttttgtcctgctttcaaatgattcacctagttgtcttccttcttctccgtttctgtgtatatgtgtatgtttttttatctttgatttaatcattccatttttagtttttgtttcttttgcatatgtcaatcactcaattttctccctcctttaaaaacagggaaaaaaaaaaaaaaaagaaaaaagaaagaaagaaagaagcaaatggcaaaatgttactttttttcataccattttcctattttggcaactttattaatatccgggtaatatcctttttaatatgcgggtaataccgacgtttctactgtattttgttggaaactgaaaatactaaccaaccaataacaaatacatattcatggtactgttattactatatatttatacatatatatatatggtgtgtatgtagtaatgtgagaaggaaatggataataccattacaggtaactggcttataatgaaacttttttgtgagaagtctataaagcatccaattcgtcaatcgattcaatgattgttagcatagaagccacgctattgttgacacctactcgaagacacctgtcgtcttcagcactgaattttgctagtaatgttccactatcattcggatctataatgtactctacttggaagctgtctggttttagtattgggtctacgttcatcacttgttgtgcaatatgagcaaaacgttcattttgaagtggaatcttgatttctctattcatataaatagggcatgccaaataaaataaaatgagcttgcaaatggcatatgttttttatgttattgtgtgtgtttttgttagtaagtaaatagactaatcttatcactattgtttatttgttgttattactatacacagaagcaatatgaggtttgtacatacaatgtatggtttagagcgagcattctttgttggtctggagcaatatgtggcttgcttgtgattgcgtatgtatttaactaaagctcttctttttttcatcttcgaggtcttttttatatagtttgtgtgtgtccttgtttgttttttaatgcattctctttcttttttttttcttaaggcaatgtggcattatgataaatgcatgtttatttacagaaagagatagaggtattgattgtgtaccgtagaggatattactatataacggtgtctgtctacttcaggatttctttctatcttctgtttgtaattgtgggagactaatactactgttgagggacgaggtaagactctgttttaataattatccttttttttttgtttatttttatctttctttacatattataaataatggcattaaacgtatctaaaaaataccttattaccatctcaaatacttcatattacgttcttgtgacaaaagatggttcgaaatatattaaatttgaattagttgaagaaaaaacaaatttaaatgataatgcaatggacttggataatccatttttaaataatctgattgtattagattcaatcaagtcagggataggcagaaacaaagataatgatctttttgaaatagttatcttcccaattttacaaaaactaaatattaaatataattatattaaaacaaatgattcacagtgtatatctaattggacttcaacatttcaaccggatacttttgtcactatgacaaccgtgtttttcatttccggtgacacaagcatatctgaatttttaaactcgttatctacccaaaagataggtatagaacagacgtatataaatatattgccattggctatgggaacagcgaatgcattagctaattcctgtggtttaaactgcccaatcgttactttaaacttatttttaactaacagtctatcatctgattgctttcctctctataaagttatcttcccagatgattcaagtaaaatattttttatcatcttttcaatgggatttcatgcaaatcttttgcataagactacattggatcctttttatagtaagatgggggttgaaaagtttcaattagccagtaaatatatttttgaaaattatgatttcaaaatacccataacagtgaaatattctattaagaataataataatgatggtcctccgttattgatactagatgatctttggtcatatttcatcttaattaatgtgccatatttggaggaaaattatatcccatcacctgaatccgatccgtttaaatctgaactacatgtattaggatatttaagcaaattatctaaaagtgatttatataataggattatgaaaggttattcaaattgtataggtgacaaaattgattttttagatacaagatatgaacctgtaaatagagatattgcaattaaattgtcacctgttaatggaaattgtttacccaaatattgttatgaaatttgttgtgatggtttgctatttaatttactagattttgagccaatttcaaagacaagagaaaatacaatcttcattgattttatcggttccaggattggaaattattatatcaattgttttagaccgttttcttgaaaaattgaaattacataagtatataaaatattaactaactataattcagttccttatgttaaaataagattagaaatgtatgtgataatctaaattttttatatcaaataattgaaaattttataagagcttataaaagagttaaaataatatgtaatatagtgtacaataattatatatgtatatgaagtatgcagaatagaaggggacaagcaatacaataacaatttatagtactactaaattcctactataaataggtgagaacttataatatcaccaatatcctattgtaagctacgttattttattatattaatttaaagtgaacactaatagaatttctgattctaaatccttatatcaacacgttatatgaaaatcttagttgttgtttatttttttttcgttgaagaggaaaattatgtttagtggtgtaaacgaagcttttttcttggaaagaagtcgttaatttgtaaaaaaagttaaaaaaaaattactaaagcaattaatatctattctgcttttccagtatgatatctcttatcatgtaaacatatacagaacaatgcaatatttagtctaatctctctgaaatattagtattacattctttacaatatatatatgcatgtatagcaagataagataattttatttacatatttaaccaaccctttacaagctagatatcctctttgtcatttttcttctcattgctggatccttcttcctccttgcccctgtactcttcctttattttcttattaataacattttcaggagagggttcatcaacagatgatcttttcaaagaattgttagtaatattactttcatctgatgaactactctttgttgtctctgaagtattcatatctgaaacagttctatccatcaattgtagagaaaatgttggtttcatcatagatgtagtatttccagcagacgacataaatacatttttatccaaaggtgaagtaaaagggttaatattggaaggagtcgattgaaatgacagtgggaacgctaatttacttgcagaattagcactgttattgtcaggcttggcaaatggtgatgatttattgatattaacagtttctggtgttttctcaattgcgagagagttgttagatgcctcttttgtttcttctttcagagagtcatcctttaattgagattctaacttagatatctttctttctaataaagtaactttcatcaaaacctgttgtctaccctcttcaaatgctttacttcgaactttttgcatattttcttcgtgattcttttttaaagcttccaattttgtttcagccaactttatatatttatcatttaaattcttttcaataccctctgttatcccatcataggaaatagtttctggtatggatttcctcacttcagctaacttattctcatattccctcttaagattactcataaacaatatcttttcctcctcaaatgtcttcttcatagattcaacgatatttgatatattatttttttctgttaaatgactttcctcttttaaagcattcaattctgtggttaaactttcaatttgttgattaagctcttttatcatactatctgatacacgaatattatcattcaatttagtttcaagatcttttgatctctttaaaaccgaagccaattctttttgtaaattatcaatggtagctttatcactttcaccctcttttacaatagattctagtatattaatctttgactcactaacgttcaaatgctcttgcagctctgaattgcatgttttcaatgtatttacctctgcagtcaaagaattgataacacctttagattgatccaatttctcgtgtgcttgttttttcaatctattaaatctatcttcagcatccaaggacttttgtttatattcttcaagctgtgatgccatctgtactgctgtagtgccagagatctgtggttctaatgaatgagatactacgttcatcttatttactttctccatatctgatgaaagcactcccaattgttttcttgtatttgccaaagcatcacgaagtaatttttcttcatgttgagaggacactaattggttccaaagtgcctctttttcaccaaccaattttgcaaatactgatgtatcaatatggttgccactattattagtttgttccgtaagattttcttgattctgattgatatcatctgatacagataacttggatgtataatgtgatatttctttttgataatgaagcctctcttctctccaagctatttccttctcacttaaaatcttggaagattcgtcaacagtttgttgaagttgttctaatttcaacttgtatccttcaatgtcattttttaatgctagtgtttcttttgttgctaaatctttcttagatattacttcattatatgatttttctaaatgaataattttttgatttaatgaatctttttctaacttattactttcaattgtctttaacaaatcttcttccttattagataaatctgtaatccttgatgacaattcattcgctcttgcctgaacttctttttgcgctctaagtagattatcattgcttgcttgcaaagaatttatttctttattcttcatagttaaatcactatttaaggctattatctttttttcatagtcattttccatatctgataacttattattcatatcaatgaattttccttcattttcattcttccaatgtttcacagcatttaattcatcagttagagctatatttttttgtctataattagaaatttgctgattcaatgtaacaatatcttcttttgataatctttctttcatttcaaaggataatttcacactttcaagattattatttatacttgttatggatctttccaattcattaataatattgtctttttcattaatacgttggttcaaatgttgtttttctgtctttaacaggtctatattcttctgataccacttcaaattattgctttgattacctgcctcgtgcaacttcaaagaattttgatcattgagttcttcaatcaatttcttattcaataattctagttggtctcgctgttgtgataaattagttatttctatatcgttgtttgacattttagatttcaatgatattaattcagcctcatacaaacctatagtctcatttgcttgttcctctctttgcttcattatttcagccgcaagattcaattttttaatctctattgtttttaagtcaatgtcgtggcttaaagaattttttattctgacacaattattatgctccttcttaatgtcaataacctcacattcagctttctgcagtaaactacttaaactttgaactctactcctattatgtgaagtttcctgttcagatatctctaacaaattttctaatatcttgattctgtcctgtaataatacttttgaagattctgtcttcttattttcgagaattaattcgtcactcttgacctctaaatttccaactttctcatttagtgattcaatttttgctaagtttttatcaatagtagtttgtaattctttttgtaatatttcaaaattttgtaatttcgtcaattcttcctttaagtgctgtttttcaatatcttgtttctcaatagtatctatatgtaattttatttgttggtttagatctttgatcttaaattccaattcacttgtatagttctgtaattttaataacgcactctttgcatcgttaataatttgaaagttatccttattagtttctttttcagcttcaagcgtttctaatttatctgatagggatcttactgtatttaccaattttatattcattttctgtagtccaactatatccttgaattcgactaattcctctgatattatgtgttgcgaatctacaagattgatatcttcatgatcatttatgcctttactattagatgtactagatattaattgtttcaaaaaaatcaattgtttttctgacaatattggggggtttttacgattgcgaatggataaattaattagtatgtattgtaattggtgagctaaatccgtatttgttctttgcaaagtatcaatttgattgttcaattcaataatgtgattgttactttcttctagttgaagttcttttgtggttaattcctcacatttattttccaccaataatttagaatcttttagtttattattaagtgactggatttcttccttaaaattttcaatagtcggtaactgagtttctaaatcagttatatattgttctacttgagactctaaatcaattttgcgggaatttgcatgatctaaatccttcttcaattgttccaattcttgaacatataacttggaaatattatttgaatttataatatgggacaaacgagcattttcttcttttaaagtgtgattattctgaattaacccatccactttattgaagtaggattctgacctctgatatctgattagttgagaatttagcgaatgtatttgttcttcttgtgatgctgtaatcttttgctgtaaagtgatatctttctcatactggttttgattttccttcagagtattttgtaaattatgtatttttttcaaatgaatatggttttgctcatctaaactatggacattttgattcaatgtctttatttcatattcctttaatttattttgatcttttaaagacagtatagtagcttcctgtttctgcaattgtaattgagaattcctttgattatcgagaaagttattcctttctgtcataagttccttagatagagtatcaatttttttctccaacaatgctacaactttattcatttcattgtctgtagatttcataactttattttcatcacgcaaggctattaactctttataatactcatttctttgtcgcgacactttctctaaataaggtttcaacacgtccaattcattgatgacattaatcttttcatcatttctatctcttatcaattttagcaatgcttttttttcttgaaaccattgattatggcaacaagataaaaattgttttaaatggatttttgtttgtggatctagtgattcataattaggatattgtagtaatcgactatctaaggcttcatcattatttgttattacactgttactagagttttcaatgtcattcgactcagcaagttgtgaattttcaacagaagtggtatccttttgattattctctatatgttcattgtgaccattttctgtgctatcattattattcttatcaacatcagctttctcttcagaacagctggaaaactgagacatttcaattgagtatcagaataacaataatttattcgtctgtcttgtatattacaaacaaccagcttcacaaataaaaaaagaaaccaagactttttagcttccatgtctctatatgcctatataaacacaatgctttttttttttttttagttgatacctcttgttttaaatctctttttattttttgacctcatttttccttttttttgtttttgtttgtttcttccactgaccaaatttgttaggggacatattgactgttgaacattcacaacatctgtacatccagaaattatttttgaccattctgaaaaggcgaaaaagatctttttgtatctgacacacaaatttcctaaacaggtatctacaagttttttttgcgacgaaaaatgttacaagtcggatgcttctttaaaaaattcagtacatttttgcttctacgctgcacgaaggacagcaggccaaatatgagacactggcgtgctcactaacaatcagaaaggatgaagaaatctgttttttttttctaccgctacagcctacagggagccatacacatcacttggactagacaaccaatcccttggcagacctctgcttattgcatacctttcttccttcctagctaagaggtaagacggtaggcagcggactgttgaacttcacagggagaacaatttgcgtactgtgttgcgctgcgccatgctgccgtaccaatcagacgattttgaatggttcattcttcctccctcgtctttcttccctgtgtatgtgcaaaaccatctaatgcacttcttatgtttattgactgtggggagaatgaggaagaggaagaaggtcctgatggaagagcttagtagagaagttggagacatacaggaaagtttcgtaatcctatcattcgccccactaatggcatcaatcctccttcacgtcttgtagtatacaagagaaaaaaaagaaaatgtatctgtttagtgccattattgcacaaagatactctcgtatttctgctggcccatcttgttttgcgtatttgttgtgcttagcgtgaactcttaattcacagtcgcttggatcaattaacaagactgcaagattcaaaatgcaaatgtatgtaccgtttaaaattaacattattatgaaagaggattaaaaagacatactgttactcgatattaaatagacgaaagccaaagtaataagagaactaagtattgatcgttgtagttagaaagagcagaatgaaaatatgtttagtaagttcatattaatagtaaaatgtacagtttggattgccttacagtgaatgttaaacgtataaactatcaagtatatttctgattgagagttatataaaagtatatgagaaaggaataacaatattgggagattctagtggtgagtgaatgtcttttatcataattgtttgtttgacaacttattccatttgatgtattgatctttttttttgtttactatttgcaatggtgatttatgagtgttttatggtgtgtacctaggtatcgatgtctacggactgtatttttcctctttttagttccaggaacagtgtgtctcttttcacctcaagaatgctacaaaatacaggttagtatcagccatcatcctttactaacaactaataatcatataatataatattccatttttattggttatatttactattcatgatgtcaatcttctctccttttttactcttttcttttttttttaaacagttttgttaagactttgactggtaagaccattactttagaagttgaatcttctgacaccatcgacaatgttaagtctaagattcaagacaaagaaggtatcccacctgaccaacaaagattaatctttgctggtaagcagttagaagatggtagaactttatctgactacaacatccaaaaggaatctactttacatttagtcttaagattaagaggtggtatcatcgaaccatccttaaaagctttagcttccaaatacaactgtgaaaagtctgtttgccgtaagtgttacgccagattaccaccaagagctactaactgtagaaagagaaagtgtggtcacaccaaccaattacgtccaaagaagaaattaaaatgattgaatcgtttagaaagattagtttcttttttaaacatttattttttgtatacattttttaatatatataaatacatatattgctaacaattcaaatattttagtttttgctctactgtcttatagtttattgactcgtttcttttcttttcttttcttttttttgtatgtactcatatacagcatctcactcttatgaaggagtatcttgcaatagtaagttattgaaaccttttttcttgtaccttctatacagtatattatgatagattgcataccaagatttatttaattattactcctattttcatgattgttattgaaaaaaaaaagtgcatgtctccatgcgttcatagatcatattatattacattatactatagtatatcgtgttatgtcatattacatatatataatgttacagcgtaatcatcattttcataaaatatttatttatacgtagcagtaagtaacttatgtacttgtccatctaaactcataactttttgtcattttcttcgtcaaaacagttttcttcggcatcagcaaccaccatatcatccttttcataatccattgcattcatagcgtcttctgttttgttgtattttttgaaacataaccaaaacaagcaaccggagatgaaacttgcgacagctaaaccagtgaacaaccatgtatagtctggatccttagcgactggagataaagcacaaccgatagcggaaccgaaggcattagtaaccaagaagatagacatgataaaggatttcatagtagccggagccttagagtaggcatattccaaaccggtgatagatgcaaaaatttcactaagcgcaattaaaacgtaagcagggacttgccatgccacatggacatggtttggtgaaccagattctaatgggtggttgtaatttggagcagctctatagataaaggattgtaagacggcagaccacaccatagataatgaacaaaaaacgaacccccagaaaatcttggtgattggtctgaatggagtccatcttctaattgttggatataagaatctttccacgattggaatgaaaacaatcaatgcaatagagtcgatacattggaagaaatcatttggtaaaccgtgcaattccatcatactaccttgagtgataaaggaactgatcatttgaccgtaacaagtccaatagattggatagaatagaaaaactttacaagcagccaaagctcttttaatttcgtcaacaaatttgtcagtccatggataattcttttctgggttcatggttggtttagctttatcgaaattgaatctatttttcattaggatccatacgactttaaaactcttttcgataactttatcaccgatagggcgtttaatatattgatttctacctaaaaccaagacgatgacacctaaccagaagaaacagaatggcaatagataagcagcccagaaaccgatgtgtaattccaactcagaagtagcaatgacagaaagagaaccgatgttaatcattaaatagaagaccatgaaaacgttttgcaaagtgatgtttgagtcctcaataactctttcaccactctttaaagtctttactcttggttttctctttggtatttgatcagcgattaaaacagacaagttggctttaatcataccggtagccaaaccgatcaaaatgatggcagcgatgaaaccaccaagggctttgtctctatcagtaatggatgggattgaggtcatgaacaagataaacataccgacaagatatataccagtacctgcggagatagtattgtatttaccccagaaggtatctgataggtaaccacctaaaattggggtcacataacaccagaactggaagaaataagaaagaccgttagcaccagtactatttaattgcaaaagaccctttggagtgtcgttcggaccgttagccatatagttttggaaaggggtggataaaccatagtaagagaatctttcggccaattcaacaatggcaattaaataacatcttatagggattttacctggaacgtgtctaagagtcttcaattcctcctcagtaggttcttcataaccttcctcatccaagccgtcatcatcttcatatgttctacttatttcatgctcgttatattcatcatcattaataaagtgaatagtgtcgtcactgttatcaccgatatcgtcttttttaattgaattttttctatttaaagagatggactcttcaccttcgagaacgactgttctaaatttatctttttcccctaaataggaatcagatgagacctgtgtaaccattatttacaatgagtaatatgtgtttatttatttatcagatgaaataaatggaaataaaaaaaagaaaaataaaaattaaatgtggatttttttttaaaaaaaaaaacaaactacagatgcaaaatacttctttttgaatatgaaaaggacaaaaaaaaaacaaaacaaaacaaatcaatgaaatatatatataaaataatttatgcaataaaaataactttatattgatatttctacgaagataattaaagttatgtgtttgttgttaaatcaaactcagaaacagtaacttagtagatgtctttcttctttttatttttattttttctcttcttcttgttctatatctgatagtacaatcgaacagcaacgaaaaaacaaataactaagatgacaagagaatactaagtggaaaagaagaagaaagacaaaaaaaagcccagtaaagaagatatatcaactttcttatatgatcagagtctaaacagaagataatattcgttcgtcaaggcttttataaatctaatatatatgattaattcctgctgtaagaaaacaacaaaacaagagaaaaaaagacaaaacacaatataaaaaagaaacttcaagatcagccaacccaaattgccacaatattctctattgcacaaatcttagggtctttattaagttaacgggaaaaaaaaaactgaaaagaaaagaaaataggaaatagaaaatagaaaataaaaaaatacttgagaaatgcgtatgcaggaaattattacacattacaaaagatatgatttgactgaaaagaaacgatcaaaaaagagaatagatagaaagagaatagataacactggattttgataagagatccggacataatccagtcatcgttgtctctgtctctgtctttctttttccttcttttattttgtgtctttgccttgttttgcatggattgggagggagggggagagggaaaagaaatagagaagaaaatagaatcaaaaaaaaaaacaaaaaacaaaaactaaacacaaaagcaaaaagatcagtcattcgatgagacaattaataataatcagctctttctctgcttttttttcttttctctcgaacggcatccacattaaaacaatcgagagacaagcccacgcttcgtagaagttgacacaaaaaaattgcaatggtatttttttttgtttttgttttcgtccactgcttgagtcaaaacagaatgacacaaaacttttgtacataatacaggcaccatttgaataatagaatccacggctctaaatttttttggacgaccaaagcaaaaaataatagatccttcctaatcgggaaatctgacattgattacatatagcttttttttctttattttttctttattttttttttcatttccatgctatcgatcagtgtttctttctatacaatacaacacaataaaaagggctaggcggcattaaaaaaagtggcatttcctgatttggtaatacacaattatttcatacttcgtgatattattttcgcgttatgtttctttttcttttttttcttttttctttttctttttatgctttccgtgattcttttatctttatcatagaacagtaatcattagactaataaatatttaaaagaaagtccaataacggtaatgtcacatttatttgcttatgaagagatgaaaggaaagataggagataatgtggttacttcgaaaactgtgtctgtatacacaatttacttcagaacatgcgagatagaagaaaaacaacattgtgtcattcagtttgaaaatatatcttctctttttaatgttaatttttatggctgttatcacagtttttacacccctcttttctactttttcttcttctttttcttttttttttttgattgcctgtttgacaatttatagatgattaatgattaattgtacaataaaagaagataacataaaaaaaaggtgtattgaagcaaaaaagaaataaagaatgtgcgaaagtttatcttcttttttgtttttttcagttaacataaagtaagataagcaatataaaaatacgtggtattatttgatggaaacactcctttgatagcaacaatttaatgaaataagaacaaaagaattaatattacgcatcaacaaaaaaggaatgtttcttctctctctcttgattatccctatattaaaaacagtatatagtttaccctatctaatatgaagtaaaaaacatggagatccaaacgaaagaaaaaaaaagaaaaatgtgcacttgtgtgaacattagtgatcaatattcttataaaaaagatataaaggtgaacacactgatctttcctttctaaaatatttctgcgatgtataaatggataagagataagataaggaagtaaacccgatcaaaatttattattaaaaatatagctataaggaaaaacagtccgttcgacccttgtcagaggccaaaaaaggatggtacaatcaaaagaaataaattaatcgcagaaactctaaagactttttttttttgcttttatccaaaaattttaatattttcttgtttttcccttttggggaatccttcgagtttttggtttttcttcttcttcctttcttttttttcaatttttttcatattttcttttcgaagttttggtgttggtgggtgaaagctttcattgaattttcaatattccgatgagctcttgcataaatcacaattaaaaatttttaaacacttgttactaaatctttgtatttcgaattgatgttgactagtttaataccgaaatcatgtaccttattattattctacgatacaaaaaagaaaaatttcttgtattttcgtctaaattcccctcgtttttcaatttatttaatattcaagtgcataataataataacatcaaattaaaatatatatatatacataacaagatttattaaacgacaaagatgtgtgctgcaaaattaaagcatgaaaaaccacccaaattaagcactaaggaaaaagtgaaggaactgacttcctcctcctcctcgagtgcatcatcttcttcaagtgaatcttcctcaagcgaatctgattctgattctgattccacttccacttccacttcctcttcctcttcctcatctgatgatgaattaagttcttccagttcctctaataactctactagtgattctgattctgattctgattccagctcctccagtaactctactagtgattctgaatctagtaccagttcaagtgaatcttcaagcaactcagattcttccaacgaatcatctagtgactcagactctttcagcgactcagaatccaactcaagttccgactcttcaagcgattctcctagcgactcagattcctctagtgattcagaatccagctcaagttctgactcttccaatgagtcttctagcgactcggattcctctagtgattcagaatccagctcaagttcagactcttccagcgattcatctagcgactcagactcttctagtgattcatctagcgactcagactcctctagtgattcagaatccagctcaagttcagactcttccagcgattcatctagcgactcagactcttctagtgattcatctagcgactcagactcttctagtgattcatctagcgactcagactcctctagtaattcagaatctagctcaagttctaactcttccagcgattcttccagcgacttagaatctggttcaaactcagactcatccaatgagtcttctagcgactcagattcctctgaaaatgagaatgtaaataataaaaagagaataagagaagataatgacaatgaagctacaaaggaaataatcaactcttcctcttccattacgaataacactaacactaacaataacaacaatagtaacaacaacagtactaagagaaaaaagttgaatatatctgcaggtactgatgaaataaaagagggacaaaggaaacatttctctcgtattgaaagagaaaagatttcatttgaagcctgggaattgacagataacacatataaaggtgcggcaggtacttggggtgaaaaggcaaatgaaaaattgagtagggttcgtggtaaagatttcacaaagaacaaaaataagatgaagagaggttcctatagaggtggtactatcactttagcttctggttcatataaattcattgattaaatagtgtttatgtatataaatatatagaattattagtgtatatgtaaaagaatcgaaagtgtatcaataaaaggcattgtatatataatgatactattatggtctgatggtcttatattttgattttataaacaatttatgcaataatatatatatatatatatatttatatattaaagggaataggatatatgaacttaatagttaacatcttttctttttaataatacttttcttttagaatttctcatcatattttcattattattattattattaccagctatatagcgaaatcttttttcttttgatcttgatgattctaaaattaacatgtcatttccatccagctctaaatctcttgaatgccttttggattgattgacagcatcaccaatattcaaatcagaaagagacttataagacgaatcattttgtaaagacatcaaagttttatttattctaattttcaatccattggatatctttctaaatggtagaatattattttccaagtcctcattgttactatcgaaattcccagtggcttgaaaagttgactccttctctaatgtattataggaggaacaacgactaggtaaatatatatttccaacataattgattctagaactagttagaccaggtgatagggataatgcacgttcattgatgggtcgttttggagtagtcaattgaagtaacattccagaagcattaacatcaattaatgggtctttagttatattatctttacaatgacaatcattatttatgtaggtagaagagtcaggtgaacagttgtgcatttgacaagtcatcatatttttttactggggtagttggtctatatatagattcaaattgtattatttgatcgtctaaactatctacaatttgagtcatcatatacatatacatatacaatgtgtgtgtgtgtgtgcctgtatctctagataaatatttatcgctgctaatatatttttatcaatcttcaatcttcaattcgtaacattgactaactttcccctattgttaatttgaattcaaaaaaaaaaaagaacttagtgatatacaattaatatctactcctctactaacaattgcagttgtcttactatgttaatggtccagagactatgtgaaatcaatttgtgcagatcataagatatgaattaaacgtttttcctaatacggtaattcattgaagatttttcttttaaaaattttttttctattttctctcttaagttttttttttgggcgtcacttcgattcttccgccacgccttcccctatttttttttttgtatatttttttttattatttttggtttccaacgtaatttgttcttcttataatagaatggtatttagtaatacggcttagtaatcgagtaaacaaacagtagcactccatcgctttaagatcaacatattctgagatattatttcttattttttatgcagttactagccagcaataattttatacttaacattacagatcttgtctttgttagactgttcgtttgtattaaacgtatttatttctactatatttatatagtttttatttctctcttatttttttttatttaaataatataactgaatggtcaaatctttatttgttattccaacctcatcatatctaataatttgtaaccttgttttgtatagtagtgccgttttataagtcttttccaattttatacaacacataaggtaatatattaaataatttcaaacttcctaggatatatgcatattcaccaaaagtatacaactacacacacacacacacacacatatatatatatatatattacaccatctattataattgttcctggaaattaattaatcttgttcttctcttccgtactgtgttttccttttgggttaattgcagctcagatttatcattatcgtttgataaagttaatccgttcgaaatcaaagaatccatatcatgattaccacataacgggattttatcgttaaatatgaaataatcctgtgtgattgccctcttacataagaaacattttaaacaatttacatggtacctttctttcttatcgttctccaaacattcgccctcaataaacccattacatgatttacaaatactattattactctcatggtaatgtctttgacaatatggcatatcatttagtatataacatggtatcaatttattgaaaatgatttcacaatccgtacatttaaaacattttttatgccattgaccagataattcacctggtttctttgcataaacaccctttgttacaatctctaacccacatgttctacatggaccctctccaggtggatacttagttctatttccagatataaccaatgagccaatattatccttaccactaccacaagcactagcgttgcttggtgttgaagttggttgatcctccctaggcgataataatgaagcagatgaagaataaaaacttgaattaatattttgtttgaatttataaaacgttggtgttgttccaactattgaacttgaatcattgtagttgtttttattagtgtcacttttatatacgtttctatccatatttttctcaaatacattgaagttctctttgtcattggtttcagtacctgtgttcaaattgatattttgaggcaatatatcattggatgttggagaaatggtattgatatacggaccattcatatataacgaatccgtgtttaaatatggttttttagtgccaagtttattagtggggaatccggaaagatatgcactagattttttcaatctgaacccatctcctgaattaagtaaactatcaccaccaataccgaaaccattattatcattattaatggagattgatggattcaattttgcatttcttgagaatgacacatcatctaattgtgcaattaattgttctacattcatgtttgtgcttgattgtgattcaatagggctggatagtacagtggagtctatatgattaccgacattgatatctgtatggctctcgtatctatctatgttattatcactattccacttcaacggtatagtttcatcatctgaatgcatagatatatgaaggatatcattcggtttaaaatctacacttttagcctttgattcacgatatttcaaattttcatcattgtcaagattatcttcgattttgtcattctcatcattatctctattatgcatagcatttgattcatggtctgaatctctttgagtcaacatatgaaaacttttctctattggattcatttctacgtcagtcttttttgcttgctcaaaatcaaacagactagtagaggaatctttattattataattattattgtttgatcgtatctttgaatcatgtgaagttacaacagtagatgtctctgaaggagctgtgatttggatttggacattgggttcaattggcttaacatgtgtttttgcattattattatcattatttttattataaataacattagtattgatcatattaccaatacgtggatttgcattcaagcaatctgcattacttgccttgttccccatagccatatcacattggataccagtaccataatccctagaatgaccactatgatcatttgaatgtatattttgattagtactcccgcctttattgacctcgaaaccggctctctccaatgctgttttataggggacccgtggattcagtttgggaaaaggcgacccatacattccattatacatattaatctagatagattattgcttactttcactatatatcgatattcttccttgaattgaggtagaaagaatttcttaactgcattgaactatgggtctcttttgaagaaattgttggtcatcttctataaatattaaaattcgatatttttctatgcgagtctcaattacaagatgcacagagaagaaaaggtcacacacacagaaaaatatctatagacaagggcatatacaaactacagtataacattctatcagtattgattaggtttacccagatttatggtcgttttaaacaaatcaacataaagtcgttttaactgattccacacatataatatacccgccttctaaattaaggtacacaaatatatatctatacgtggatacatacgacaatagtttgaaagggagacctgacaacaaaccattcaacttgattatctgttttatttgctttattatattgacatagaggaacaatatacatacatacctacatacatatatttgatactactattgaaataaaaatgcctactgctaatagtctagtgttatttggtaattccatcaatcgggatggtgaaatgacacagcatttaattgaacaatattatgagtctgtattgaataataaatcaaaagctaagaggaggaactgtagcagatccatacgtattccaattgaatatggtcaacaaacaagtgcaaacaaggatcaaccatcaaatgacaacaacaataataaagatcataatgaacaaggaaatgaaggtgaagaagaagagatagaagtagagatagatttagatgaagatagtaaagatacagaaacttttgatatggatatggatactgatatggacatggaccaaattgaacccataacattttggtccaaaattaagtcactttgttataatatatttgttggagattaccaaaaggatttacttattgccaaactgcaatcacaaagaagacactccatgtcgtatgcagaatggaggcagtccgcactacgattggataatttaacaaataaaatcaaatggaaacataagttggaatgcggcctttatgattaccagttgattcaaagtctattacataaactacaaaaggcacgattaaacgaggattatcattatttgctttatttaataaggacaaactgggtcagaaatttagggaatatgggtaacgttaacttatatcgacattcatatattgggaccaaaaaacttattgatgaatatattgatgaatcaagaagatgcattgaagctctagttaacaaatcagatttggatgatggatatttaatggggatattacaacagactagacgaaatattggccgtactgcattagtgcttagtggcggtggtacttttggtttgtttcacataggtgttctctctaccttatttgaattagatttattacctagagtcatcagtgggtctagtgctggtgccatagtggccagtatattatctgtccatcataaagaagagatcccgtcactactgcaagagattttaggcatggagttcaatatttttaaagatgataaaaggaaaagtgaaagtgaaaatttcttgattaagatatcacggtttttaaaaaatggcacatggtttaataatgaacatcttgttaatacaatgatctcatttctaggagatttaacttttagagaagcctataacagaactggtaagattctaaatattacagtatcaccagcatccttatttgaacaaccaagattattaaataacttgacagccccaaatgtgttaatatggtcagctgtttgtgcctcgtgttcattacctggaatatttccatcttcgccactatatgaaaaggaccctaaaacaggtgaaacaagaatttggaatggttcaagttccgtcaaatttgtagatggatctgtggataatgatttaccaatatcaagattatctgaaatgttcaacgttgatcacattattgcgtgtcaagtcaacatccatgttgttccatttttaaaattatctgtatcctgtgttggtggtgaaattgaagatgaattcaatgcaaggttaagacaaaatttaggcaaaatgtatgattttttatccaacgaaatgatccacattttggaaatcggtagtgaaatgggtatagcgactaacacgttaactaagttaagatctgttttgtcacaacaatattctggagatattactattttaccagatatgggaatgctacggaggataaacgaattattatcaaatccaacaagagattttttgttgcgtgagattacaaatggtgctagagcaacatggcctaaaatatctgttattgaaaatcactgtgcacaagagtttgcactagataaagccattacatttttaaaggggaaaattattgtttcctcttcaataaagaatcctttacaattcagtgatttcccattaataaaggcaaaacaaaatggaggagacaaacagaagtggagggaagaagagaataaagaagaagaagatatggaagctgtagcagaaagattagtgtcaagttacaataataacaacaacattggaaaaaacaataaagatactttgaaaaatcatgatctttcaatccaagataccatggaattatcttttaaaaatgctactaatgtactagatgataatttattagagacagaatcgccaaactctctattattgctgaatgaaaatattgccaataagacctcagtgacaactgatccattaactggtaaagttaaaatccaaaccaatccatcttcttcttcatctactgcattaatttcctcatctttatctaataacatgattggtagaaaggtgcgccgcaaatcagattctggcatggttacctccggtggatactacttccaagatcataatatgaaaccattacagtttaatattccatccccatcaacagataatatccatggttattcaaatattcataacaatataggattacataggagaagatcgcaactttacacaaaaggaagtactggccatattttttttcctatggaaagaagatcatggaactatacaaacccgaatagtaatacaactactaatactactactaataataacaatagtaataaagttaatagcgcagatataaatgcgcatacttttaaaaccgataatccaatgttgtggtcctcaccatcacctttagttaatgagatggttcctgtaaattctcctagacctaaatacaaatatcgcccctatttcaattataaaagtagtagaattaaatcgccatttactacaagacccaaatcaaatactacaggacaagttcactttagtacaaatgattgcaaagataatgctggcagcagagttgacagttacaacaaaaatgaagatgataacgtatatagacaaagcccatcgtcatcatcttctgcttcagtaaatccattttttcctggaatgatagagaatgattcaccacaacagtcacataatgaatatagacgatatagtgtagatatcagtcccaggggaagaaaaaacattactcatttgacaagaaggcatcaacatagcagatcgattgaatcacatagtgattcaagtattgtcaccaagtctgcaatatcagctacaactaacaaggaaacaaaggacgatattttatcttcttcatcattcatcaaaataaatgagcaacaaaaaaacgaaaataataaccataatgacaataagactaatagagagtcaacaaactctatcacatcccctcctgactcatctcctgcatctcgagaagatttagcatgatgaccataaagcttgtgagcatccttatccatatctacttccaccctcccatgtacaacatcatacgtttgcgttcatctgtaataaacattcactcttccaccaacttctcctctccatctattcatcgttatgaatatattataaagcaatagggcatgcttctttaatatttcttctactctccaaaagtcgaaaattgaaaaaacaaaaaaaaagtcaaatcaaaatagaacattcaacaaattaaaaataaaattgtttaaggctttttttttttggggtataaagtttgtaacaaaagtaaaaggtggagaaacaagagaagataaagtagagtatgttataattatacactagacaacaacaacaacagcaaaaacaactaatttggaaattaagtgatttccctatttgattctattataatttcattcgactggttatcaggattatgagtactgtaggtgtttacgaaaatgttcccggtgagggtgatgagactaatgatggaatggataattttagcgaatccatattcaatgaaataaatgatgacttagaaatgagtttggagaatgacaaccctgattttctagatatctaccatctaacaccaagacagagactgatatatacagttaaaaaagtgctctatcacttatctaatcaattttttaagttacctttatggcaacgaattatagccacagttgctactgtattatttttaatcttgggtatcatgtttttaatattccataaaactattctgaattctctagtagaaacatcgaataacttaagagagaaaacatcaacgcagtttatcttaggtctattgattttcactgtggctttccctccattaataggtttttcatttttgtcaacaagtacaggtctaatctatggtgtatctttacatgggtggttactattatcgattagttctgtcacaggatgcattgcctccttttatgtcttccaaaatatattaaagtcaagggctcagagattagttcacttgaataaaagatttgaagcatttgcttctattcttcaagagaacaatagttatttgatacttgctttgttcagactatgtccattcccttactctttgactaatggtgctattgctggtgtttatggtgtttcattgaaaaattttgctattgccaacttaatcacaaccccaaagatgtttatatatctattcattggatcccgcattaagaaccttggagagactaaatctactggtgaaaagatgcttgatttattttctatcttatttactctaacggtcttattctttactgcttggttgttatacttcaagactcaaaataagtatcgtgaattgattaacaagcagaatcaagaacaacaatctatgtcttctgaaatcccagattctgtttcatttgaattgtgaaaattaatcatagcgatgtctctccatactgatatatacatttctgcagacacacacgcatatacacacacacacacacacatatatatatatatatatacttatatttatataattacagtttagacataaagttattgtagaaaaataagaacttttttatgacctcataaataattacttgtttttattttcttgaaaataagtgtatccatcattcatgcctataatcaccagcataaagatttctacttcctgacgaacctatgtccacaacaagtatccgcatttactaagattcaaaaagtcatatgttatttagaattttgactcaattaccaaaatccatttttaatactcgcttgccgataattccatttacgaaaccattaaatcttaagaagtttaacccccaaaacagaacatacctctaccataccagaagaagagaaaataataagaactatcaatcatatttttacaatcatgattcatatcaatatcaaaaccaatactcttacaaaagatttaacagtagtcctcaacaaaatagtaagactttgtggcaagtactaaatgatccctccaacagaaagtacctctatatgatccttggtggcggagcttttttctatgtaactcatttagaagcagcccctgtatcgtctagaagaagatttatttggattccaagatctattgaattagctataggcaaatcttcatataaatctatcttaaatgagacaagacacagtatccttccctctaaccatccagtgtctaaaaaagtagaaacaatttttaccaagatcgtagaggcggcagcaaaagacccttcagttaatacaactcttatagatggaatagattggaagatccatgtagtcaatgaccccagagcgcctcccaatgcatttgttttaccaggtgggaaagtatttgtattcagtagtatcttaaggatttgcgaaaatgatgatgggattgccacggtgctatcacatgaatttgcacaccaactggctagacatacagcagaatctttatcgaaggcccccctctatttaatgatcgacttattactctactctatcactggtatccaaggcgtaaatgggttattaaccgatgcattattaaaaatgcctgcttcaagacaaatggaaacagaggccgattatattggactgatgataatggccagagcatgcttcgatcccaatgaggctgtaagagtatgggagaggatggctgcatttgaaagacaacttaaaggtcaaggttccccattggaatttttgtcaactcatcctgctagtgagaagagaatccaaaatatgttgagctggtctaataaagctaatgctctttatgaacaatcagaatgtaacagatatttaggctattataaaccttttcaagatatgtttatgagcccatcctgaagtacgagtttcttttaatatctgtcttttataaattatattaatgaaatgaggaaatatatatatatatatttaataatacatgctaatataatatctgcgtattaaaatggccttttccttctctttaacccaattgttactatattattttgattgtttgcattggtccgtttttcaataaatttagaacttggtgcattatttatatctttattcaattgtttaattgttccttctctcctaactaaacaatatttaattcgttcatcaattatatcatcagatttattcttctcattactaatctcaaaagaattctttgaaccaaacaatgttgtaatattatcttcatcatatgttgatatcttcttaatatcatatattaagggtccaaattccattaaccaaaatggatttactgcagtgacataacacatatattcccttgttgtcatcaacaattcatgatatacaacataattaggaggatcatcaattccaaataacacacttgtagggtgtaattcaactttcataccggttctcaaatctacatatctccttaaaccagtcactttagatgcttggtgagcaaatgcagaacatatacattttctcacaatatcccaatttgtacctgatgatactataggtatcttattctttttcataattttaatcaactgatttcgaatttctcgtgccttaactaatgatctatatattaaaaaatgcttttcacaccattttgctgaaaattgattcgatacccattgattataaacattcaacaaggtaagatgatcggacataggtaccaaaaatctctccctagcagaatccgattccttttcacgttcttttggtctatggaatacttgtggaacggataacatagatacaatggtgactaattcttcactacatttattcttggatgcaacaattaaagcttttgacaaggtaacttgtaaagggaactgtgccatctgtctccccaaactggtcaaattcccatagttattaattgctcccaaaaaccataattcatacattgattccagcaaagtttgtaaaggtggtttatccagaaatggaaaattaatgcaatctttaacacccaatgatttcaataaaagtaatgtatttgtaagacttgtcctttgtatttctgggataggttgaatatacatatcctcttctgcagtctcttcggtatacaatctgtaagctatcccgggccctgtacgtccagctctaccggatctctgattagcattagctaaggatattggtgttaccattaaactatcgagaccaatgcttggattaaacacttttaattttgagtaaccgcaatcgataacgtatctgataccatctatagttaaagacgtttctgcaatattagtagacacaacaatttttcttttagatggttccaatttatgaaatattctattttgtaattcaggtgacaatgcagaataaattgggtaaatttctatatcattaatttcttcaaaattatcaataccatgttttttggaatacacttcaactaatttattcttaattgaatcacatgtaatttcaatatcttcttgaccggtcataaaaattaagacatcaccacttgaaacaggagtttgtaaatggattcttactgcttctataacagctgcctcaacataatcatctatagatgtcttggaataattgatttgtaccggataagttctacctggaatagtaaattgaggagcattaccaaggaattttgaaaacttcgttgcattcatagtagctgaagtaatgatcaatttgatatctttccttttagtcaataaatttttgaacattcctaagagcacatctgtattcaatgatctttcatgggcttcatcgattataatacaattatattttgtcaagaacgggtccaacaaaaattcacgtagcaatataccatcagtcataaattttatcttagtatctgaagaggttatatcttcaaatctaatggcatagccaacagtgcttcctaattgtgtattcatctctaatgccacacgtttagctacagatatagcagcaacacgtctaggttgagtgactccaatcatcattgaattagaatttcctttagtgtcagtattattatcatcatcaaaatttcgacaaaaccctgcctcgtataaaatctgtggcaattgagtagttttaccagacccagtctcacctatgacaatcactacttgattagataatactaatgagattaactcatcttttactttatatgcaggtaaattaagtctttgattttgtatctcttcttgactttgaagatattttttatcaatatttttattgttgtgcaaaattgtgtctttcttggtcatttcagttgtgtcattgtcttgaacacccaaaatagcacccattgccgtgttagccaattgtacattttgatgatttttggttttttgttctttagtcaatcttttaaggttaaccagttgactaccctttcttgccatttgagagaaagtactatttggatttttaaaggggttaataattcccatatgggatgaatcagagatggaaccaacgatagcagaagttggaattttatatttattacaataatctaataaaaatgatggtaaccaatctttttttttatcaatagataccgggcataattgaacgttcgaaaactctatttgatcatcttttgctaagtcgttaaaacaataataataatcttgtgtgttttcttcatcattatttattctatccgaattatttatagcagtcttcttacctgaaatagtgacagatatattaggagaaggtttaataaaaggattctcagagccaacatattttgaatttgaatattcttttagctttgaagctgtagatttctctaattttttaaagattatcctttttggatcaattttttttacattaacactttgtttcttggataagtaatcaagctcatcatcctcttcattcccatacccatcctcattatcaaatgagagtggaatcaatctttttcttttctctgttatctctaaaagggttgtgtttgtcttagacattccaatatcactactattattagtattagtatcactatccatgttgtgcactttatttttgcgattagtactattactatcactatcacgaagtttcgaatataattccttaaaaaaagttaatcgatcaacaccaccccttaatttaagtaccacagaaacagcattataaaaatcatcaaaagtgtttttggtgatagccaaccgttgtatgattttaaataaatttggtgttattgagcttgttgaatgggcttggatccatttagacaaatcatcgttcatgactcagctcagtataaatacagttcaccactcttataacaatatcaaacttttaaatattagaaaacttattacctacttatacttactcaattatctatttattttattactatagtagcgatagtagtggtagtgattgttgttgtgtatataacaaagaagtgattgaagatataaaaaaaaaaaaacaaagaagacagcggctatttcattgcttctaaagtatataaaacatgttgttatgtaaatacattcacttaaaaaaaaaaaaacgtaaatacctccaacggaattaaacaacccgtttcggcttgtatttgttcccgtcctgttttcgtttttgcttgaaggaaaaaaaaaagtaagaagaactgaaaagatcccaatagttcaagattaaagccagactggtaaaattacaataagaatagagtactctagttatctgtatgcctctgccatttatctagatggagacaatatagatatgatccgtcacaacttcttaagaacatctttcctcattcgggggtttcaaacaaattctattttatgcaaaaatgccacagaagctgctgcccccaaagaattacctaagataaatggccaacctactatataccataagaaaaggtctatgtctaatgtagatgggtaccgtaaggccaaagtaaaccctggcttctatttacaaaaagcacaatcttcaccaacaggggctatccacagtgaaactatcccattgagttttttacctaaggatgatccgagacgtcagtttgtggttccacatttaagaaatagtgataaagtattaggtgaccaccgctctcctgaagttttaacaggtaaaaatgcgttgttgaaccatgtgaagagttatcatttaacccctgaaaaagtaactgagattatcagattaagaagttcagatcccaataaatatacaagatctgtcttagctaaacagtttggtgtgtcacgtttgtttatatccttagtggccagtgcacctaaggaaagattacaagaaatgaaccaaagattgaatatcattcaatctagatgggggaaagcaagaaaacaagctcgtttggagcgtgcaaagagacatcagacatggtatcgtgatctgtagagtttcacacaagtatcacaataaaacaatactcttttctctcttttctctcttttctcgcttcttcctctctgctatttccatgatattccattacttgcacatgataacagccatcatcaaatcagcaagagcctctctcctgtatatattaagatacataaacctgtatgtatatcgattgtaggtaaacgataataataataataataatcaacactaataagaagtgtctcgtctcaattcatcgaatgtattaataatatgactaattgatattactaatccatgacaccccctcatattttcgtaacacccaaacctcgcacccataatttgaaaatattcaaaaatgaaacagaaatatccatgacaaatgtagatacatataaatgaatagatatataagtggtgggtaatactaatatactcacgacactttcctatactaatatctacttattaacttgtttctcaataatcagtaaagaagtccaatctacataaaataatcataaattatactttattcccttctctttctctttttttgttctttttctcttttttttttgtctttatatacaatgtcacattacgatgaagacgattattatgacgaacaaggtgatatgcctgaatttcaagatgaagctgaattagatgactacttaactgacgaggaatatgatttgatgaatgaaattatacctcaattgaaaaaagatatggcagaataccatggttggactacttttgatttaaaattatcactcttagatactgattttaatattgatgatgccttgcatgatttgaagaaaagatttaaaagaaagaaaaaacaggctgatgccgatatcaatacttcaatgtccaatttgaaaattggttcaaatacacagccaatagagcaaacaaagaaattcacatctcaacttaggaccgatgatgatataatattcatatcggataatgaggattctaatgctatttcttctttggatcaatgggttagagatgataaagtcgaagaaaaatttattaaaccatataaaagaattcttgaaccaacaaaaccaagaaatccaatcgatttgaaaaagtatttacagtcccctacctttaaaccccatttaagttttgttgtattaggtcatgtagatgcaggtaaatcaaccttaatgggcagattattatatgatattggcgcagttgatcaaaataagattagaaaattaaaaaaggagagtgaacagataggtaaaggctcattccatttggcttgggtcatggatcaaacagtagaagaaagagaacgtggtgtcactgtctccatctgcactagtgattttagcacttcaaatgtagatttcactattgttgacgcaccaggtcatagagattttgtgccaaatgcaatcgcaggtgtgtctcaagcagatgtcgctatattgacaattgattgtggtatcaatgctttcgagtctggttttaatcttgatggtcaaaccaaagaacatactttattagcacgttcaatgaatattggtaccattgttgttgcaatgaataagatggatagtgttaactggtcttcagaaagattttatgaaattcaagccgaactatctacatattttgatcagattgggtaccaaaaagataaaattaaatgggtaccattaagcggttattctggtgaaggtgtatataagataccgtatccatctgaacagaattggtacaaaggtccatccttagtagatactttagaggatgttgctaagactaattatagccatctaaatgatttagattcattctgtaaggaaattaaagaaaaaccttttatattctcaattcttgaagtaacaaccacaaaaaaacatgatgaatcaatactatctggtagagttgaatccggatcaattcagcctggtgagacaatcactgtatatccatctgaacaaagttgtttggtcgacaagattctttctggtagagaacaaacctctagagatatcgctttgaaaggtgattttgtaacattgaaattgcgccattcccatccgaaggatatccaaaatggtgacttgtgttcatctgttggatatcacattaaatctactagaagattcaaaattagattgagcacattcaatatggatcgtccattgttaccaggtacatcagttatgctattcaggggtgtctatgaagaacctgcaagagtcaataaattgatctctctagtcgattcaaaagatccttcgaagatattgaaaaagagagttaagcacttaccatcaaaccaaactgcaattattgaaattgaattgactgaaagaagaagatggattccactcgtcactattgatgaaaataagcatattggtagagttatccttagaaaggatggtcgttctattggtacaggtgtaatattagatgttgagtaattcagttaagtaaaaaaaaaagatattattaatttattagtttattaattaatactatatattattgtttgatttcagcttatataatcgacaataaggataaagatcgccattaatatagctgcatatgtaattattttcgcagatttacttgcagaacgctgtgccttcttcaactgtatatttcctttgagaatattagattcaatctgttcttgattatctaacatgttgttaatattctgtgattgtatttgtaaatgttgtgataattctgtttgtaaagacataatatccaagatagcattattaatctttttgacatttgctagttgatcatctttggcttttagcaattcttcatgttctaattgtaacatttgtatttgttcttgggttaactttgaaatagtatcttcatatgtcttcacttcatcttgaacagtctctacgtattgaccttgatttgatgtgtctatagaaactgaaatagcatcataaatcatatctgatgatgtgtcaggtttaggctgtacttctgcattaaaatcaagtgtatcaaatttttgtttattagctaacctttcctgctgcattgaaaggaatctggatgaaattgatttaatgattaaattaattgaattcaaaacaccactcctatattgaatattagtcttgcaatattgtgccaacagagcatgctgtgttgaatacataaactttgtcatcgaaagatgactctttggtgatatatattgatcttctattaattttacacgtgcattttcataagtctctagttgtttaaatttagttacgtacttttgtaataataatctgaattccgtatcaaaattatctttatcttgatctgtcatatttactaaattatttccatctttattatagcctatattattactgattttggcagtgatatcaccataatatgatgatgtgacttcatttaatacacgggacaattctctcaaacagtaaaacaaatctttacactctgaaacaaaagtgtctttcaataataaagattgaaacttctcccacttgttatcgctcttatggatcctatttgctgattgttctctttctgtaggatcagtgttatcctctataacttgtatgtatttttgaaataacttggttaaatcaggcatctgtaaatgtgattctggatatgttctcactgcttagattcaaaataaaaataaaacaataataacaaaaaaaaaaaaaaaggaaaatacaaaattgtgaattagttgataaatataaaggttattcacaaccagttatcactttacttgtgttatgcttcgtagtaaatcactatgtttttcaatatttataaacatgtatatattaagttattatgattagatgatgaaaatatcatcttatgcaatacacagttccttggattttgaaagtgtttaatttgtacataataataacaaacaatctttagagatagggtttaaagagtaaaaccttaccctaattaaaaaatgaaaaatttgccaaaagtttttaaagaaacaatttttaagttagggtatattttaatattttcaagtttttatgtatattttttagtaaaatattaggttttgatatattaaatgtatgtgtagtatttactaacgcgtcaacaaattaatagtaatgtggaaacgcgtaaagcattaatgtgaaaaaataaaaaagaataaataaaagaataaacagcattggaactatttaatatataaggatttaaagtgtttgattacattcaagacaggttagatcttcatttattctattgtacttatcaaaatatgaatttaacaagacacgtgtcgagttatacatcgatagataggttaatctctttttttttgcctttttttaaataattaaaatgtcaaataataaagaagaagatcaatatttacaactatgtcaaagaattatcgaagaaggagagttcagacctgatagaactggaacaggtacctacagtttatttgctccacctcaattaagatttgatctaagtaatggcaaatttcctctactgactacaaaaaaagtatttactaaaggtattattttagaattattatggttcatagcgggttgtacagatgggaataaattgagtgaacaaggtgtcaaaatatgggatggtaatggttccagagaatatctagataaattggggcttacagatagaaaagtgggtgatttgggtccgatctatggatttcaatggagacattttggtgccaaatataagacttgtgatgatgattattctggacaaggtgttgatcaattaaaagatgttatctggaaattaaaaaacaatccatatgacagaaggattatcatgagtgcatggaatccacctgatttcccacagatggctttaccaccatgccacgtcttttcacaattctatgtcaatttccctaaggaacccaacaaaaaaccaagattatcttgtttgttatatcaaagatcttgtgatatgggccttggtgtaccatttaatattgcctcttacgcattattaaccatcatgattgcacacatcacagacatggaacctggtgaatttatacatactatgggagatgcgcatgtttatagagatcacattgacgcattgaaagagcaaataaggagagaaccaaggccatttccaactttaaagattaataggaaagtggattctatcgatgatttcaaattcgaagattttgaaatatgtgattacaacccacatcctagaattcagatgacaatgagcgtataaattgctcatataatatattactgttccctcatatatatttgaattactttataccagacataaacacatacatagataaatatacatatatatatatatatatatatacttgtatgtggataacaatacttatttagtataatcaatttcatttgttatataattaatcacacagtgatttccagttgataaattggcggctgctattacatcttgtaagttaatttcactcatctgttgagaaatagtttcagtttcttgagttattatttgctttatactggtgatatcatcattcaaatatttaccatataaatttcttagtaaatcatcgctaatcaaaaatttgtctgtaagcatcgaaatgtgaggtagcggatagtcatattcatataatctttcagcaaaaaatctttctaaaattttgtatagtactgtgtctttgatatcattgtttctgatattctgatctaaatctagaaggatacatcttctccaaatcatggatataagatattgtttaatctcaaattcaatcaaatcaacattaaagcttaataattttagtgcacaatagatattgtctgaatctgtcaagatactgtacatctcaattgtttcgttaaacgatattgttacattatccattagtaaagattttaacttattaaacagtgattctattggagtacctataaatcttgggcttaactcaatctgatcctgttttattcgattgataaattctatttcagcatctaacaaatctaaattacactgaatttgttgtaatttcctaatttcaaattgttttttatcttgttgctcgttgtcatcttcttgttctacgagacatgccaatttagccacatttaaatggaattgattttctgtaatatcctggtgtaataatggcaaatcaaataatgtctttgatgcatctgaatatctttggtcaataatatcttgaatccacgaaatagaaccatatttgggtgaattatcttgaaaaaatttgattaaattatcatgctgttctgggaatctataaaataattcggataatttatgattgttggcataatattcaaataacgtagcagaaaatgacatttgaaatttttggaaaaacttattataaagatcaacaacatccggttgatcaacaggtaatgtctccaaagtttgtactaatgactctaaatctttatagaattcagtaatttctatggattgagattgatatccgaattcgcaaagaatattattccaatcgatatggttgtcaatgtatagtttatttattgttataatatcttgtgatttaatttcatcagtagttataatacctgattgattagtccatagtctaacttgattaaaacagtaatataagatcttcagtagtgttaaaaattgctcctttatatcatttgaattaatttctacattttcatttttaaattgaaatttgtattcgaaaaagatatcattaatcttggttaaattagataaggtaataaaccatggcaagctatcaggatttacctgtttagcattaagtttcatggtaccataacgaatgtcgttttcaccctcttccaacactgcttcatatagacatgagttgatcatctcgattattttggatttaaattcaatagattgtgagtttgttacaatattatgtaggaaatcattaaaaactttaggatattgtaatattttagaaataattaattcttctacacttacattattttgctttaatacattttcccaaactgtttgcaagccttcatcactaccatttaaaaaccggtaaagtcttaaacaactgttcataatttcgaaattttcaattaaccataatttaaatgtgactgaaatattgttattaaaatttaattcagtaaattttaaaaggtttttgaaataatttattcttatagatagatgttgttgtagatttgatgtaaatttgggaatatatttaccagttgactgaataatctctaatgcagacaattttaaatcgttttcaatggattttgtatcaagtgcaatgtctttggataaattaaactctattggattcattatttccatttgagtatctttatcaaaaaaataaatggcttgttctatatgactcttaataaatcttacttcttccagagtagtttctaaacttaatttgtcctttaatgtaactgaaataatgccaccaagacctttgcttaataaataaattttgtgggaggtacaaccagttccgaatatattcacagagtctttaaaggaaatcacatcctcccactttctctttaatgtaaaggaaacatcaaattgtgaacttacttgagttaacaccatggcattatggaataatacaactacattagaaatttttgatgtttctgtaatagatttctcaagcaactcgttcgaccagtttggaataataagctttggcaatgtaatgggggatgattcgttcaatggcgaggtgtaagtatttattctatatgtagatataatattgaaattattagcttcctcatcaaacaccaatgtagataaaatgtagtaaacatcatctggataattagatatggatgataaaacaacgtgagttaaataattatcattatttttattatttttatgtgaaattggatgagaatccaagatttgtaaagatgaggctgcaaaagggtataaatcctgtaaagattctaaaatttgattataaatattgatttcaattcttttaaaacaattagaactaacagacaactgccatatatggaattcaccccttctagtggtaatatataacaatctatcaccttttcctacaattggaccatttttcaatgaaactacatcatgagactgatatctgtttttattattattaatattagtcgagtcatcatctcttgaaccaaataaactcgagaagaaactcctttgtgatttaattaattgttgtttcaattgaatccttgggtgacccattgaatctcttatagtgatgaatagaactctaccaaaggacgtagctaagacaatcccactgggttcaacactgattgctgaagttataaattcattagaattggataattttaaatctaagacgtgtgccatattctgagacagttgggaataaagattatttatagaagataaatcctcgtaaaagaaaatcttacctgattgtctatagataatgcagataccccagcaactgttgtctgtatctaaggtatccattgtagcaggccaagttagtaaacagataggaggagtatcatcttgaccgtcagttaagttcagaggaagcttattatatgcagattgtttccattcatggtaattccaaatgtataaatgcttagtatcgttaatcattgctttacctgagaacgaatcaataaatcctgctaatttaaattcttctcccaatagagccaatagatctaattttacactttctactgaatatttttcattctcggtcaataaatttggttcaactatatgatccacgacagttgctttggaattactaaaagttaaatctactgattcgtcattattattattttttgtttcatcaatgattatactattgttagtattgtctactaaagaagtaacttcttttctcaatttaaaaacaggacgacctctatcaatatcagacatccttaatatctcgagtaattccctctaatggttttatataactattatgtatgggcacaggtacagagattacaattagtagataataaatatacaatattttgttataaaaccgccatctctctttctactagaataaataattaacaaaaaaaaacatgaaaaagaaataaaaatgaagaaacaaattaaaactttgctctataaatatcacttagaacggaaagtcactgtgtgtatgatttcaattctcacatactaacgattaaagaattaatcatacaaagtaagaagccaagttggtacagagaacaacgttgaaaaaagaatcatttggtgatgttactgaataagtttagacatgactattatttgctaaaatactctaaagtatatatgtgtatgtgtatgtgtgtatgtatgagttaagtctgcaatggaagaaaaaaaaacaagagacaaagaggacatgcagggtgattgaaatggttaaataaggaattatgcttgttgctttttagcgttacgattgtctattagtcttaacatatttctgatcagcatggcaatggtaactttaccggtcattggcacatataaagaagctttggtcttaacatcctcactaaaatttttaaaagaagagaagtttatacatgcagcaccttccttaacgtattcagtggggaattgataactttccgaaggaaccccggtaatgatgatatctgcttcttgtgagagtttcttcaacaactcttctgaataatcacccaaatcttcaacatgatgtttcgagtatttcaaacctgaaccacgagtgaatttttgtatattgttgatgtctacagaatatacagtagcaccgtcattagccagtaacgcagcaagaggtctaccgacaatctccgatctattaacaacaacacatttctttccataaagatggttgccatcaggtaaaagtgtattatacaatttcaaatattctaagattttcacaatagccaaaggagtgcatggtaagatagattttagctgtttctctttatccaaatatctaatgttatgatacatgttttgatagtatagatgatttaaaccttcgacatccttttcaggtgatacaatctgttgtaaatattggtcttgtgcatttccaaacacagggaaatatattatgataccatctacttgatcatcgtcgttagcagctaagataccttcttcaagtctatctttgtcatcgaacttgcgtaactcaaatcttacaccaagtgattcagcggttttgcctgtccagcgggcatacatttcagctgcaggatcttggttggctagaaaccctaccaataatggaccattgggatgagaagtacttttcaattgaacaattttattttgaatttcttctgtataaaccttggcaatagctgaggctaagacggttctacctggtttaggtataacagacaaatcgttgttattattattgttgttttcagtaacagaggacatagttatatattgatttatctaaaggaatgtgatatgaggatgtgtatattatgtgaggatgatttggttggagggagaggggtatataaatcgtagaatatgaatgtaaaaagaaaaagggcttgttgtattcaatacagaacaactgactatattgaacagttgaatagcacctaatatatatatatatatatgtgtgtgtgtgtgttattgcgcatcgcttttttaatacaacattagcatttcttcacaggcacatagaaattatatattagtgcatgtaattattttctcgaagggcacattgctaataaagcaggtaaagcagagaatacaagaaggaagaaaattttagatttgactcgggcttattttctcttgtgttttctctccctgtgtgcagaatacatgactcgggggaaagggttttccagagtcagagtctaaatcccgccagagtcaaggcacgttcaaatttttcaaaataaaaaaaaaaataaccatgaagctgttaccttgctgaatttcattacacagcaaaactatctgttgcaattagcaagatgtatatagattgatcaggtcatctgtaaatattattttgggtttattcgtattttttcatggcttatatttgtaaaaggtctaagttgttcataaataatgcattcatagatatgccttcataagagcagaacaatttataaaagaattgatatataaaatcataatcttgttttttttatgtctttaattgatacatgtaaaacagacttctgttgttcaattcactcactagaatgttggctttcattatttacacaaaacatcattttttcttttgatattattgaaaaaaaaaaagttatttttattggtttacatgtttataatatatatacttttaaaagcgtctttagcgccaaagaaacagacctcatttccagtatttacaaaaaataatttattttttattcgtcgtttagcacaatatcagatttaaatgtatagagttttggaggttccaaaaaattggctattgaggaatatcttatttattggataaatataggaagcatagtggtactatgcctaaagtaaaattcctcttttcttagtaaagtgtctcagttcagtgctaatttttgaacaaaatgctttcacagtggcacattccttgagatttttcaaaaaaatttaatttctgctgaatagatataaaagcacccttcataaccctgaaataatcttttttttattcatgtcctagtttttaagaaatatttatttttatatgtttctattgtcaagaattaaacaagtaagctgtatctcataataatgagtatgatatataggatcacaggaaaaaacatggagttcatatcagtattcaatttaaaaaaaaaaaaagtagattttgattaaagtcaacaatttagtctattgagcaaacctttcatccctatatggtggtattatcatacacttgtatatgttaaagcaaaatcaaaagtagatattattacagttaaactaataaaaccgattttcattatttcaaaattccagtttctacataatttatatccagtagtgcaaagtgtatactgtagaattggtacatataaactttttcttgctaacgacgtctactaaatttgggcaagtattcaacaaagctatttaatttataccatgtatcatttacttgcacaaacgtgtacatatatagatatgtatatacgtatgcatggctttatataatagacatttccacataaacagtatttcatttgtcttgttatcttcgagacgaaaactaaaaagattaaagaaagtgaaaaataaagatagaaaaaaaaacacagaggtatgtaaaaagttgataatgcgatgagatgaacttgaagcaatatatggtcattattttttgtttgtgatatggtaaaacacacatatatatgtggacacaaattcatacaagctaatagatcgctttgcattatttatttttaatatttcttcctccttttctttgttgttgccattatgggtcaattccataccttggcacaacgtcctacattatctcaaactgataattttgcatttcttctagaaggtacattcaatgtgaatgattcgttccaatttgatatagattcgtcaattactcgtaacaaagatgatggtgactataatcatttgctttctttttaccagaatgattccaaatatttggatttacacttaaataatatacagtatccttttgttattcaaaaatgtatcccatttagatacaataaagattgtaaaaaatattaccaaatgattcaattttatataaagaagaaaatggatagtgttaattcatctaatggaagtgctcctttctactcaaaatataatttagatagagaaatttattccaaatttgagattgataatgaaggtagtagtagtattaatattgattcgttatatgattcagatatagaaaatcttattctggatgatggaaaggaggtacaaaaagaagaagaagtaagaaaggaaaacgaacaagaaaggaaggaagaattcaataatgaaccaagtttttttcaatcttgtacagataagtttctaagaagtacagataaactacatcaagcgatcaatgatacaatcaatgaaacgtatcttttaataagcaaaaagtttatttaccttattgaatctcatgtaatttatcctatctttgagttttcagatttatctgtttttagaccaaatctgtacccaatggaagtaaacaacttttttaagatttgggatgatagaatcttggctatcactaaagaggggatttttgtatctctaatgttatcgaactttgattcaattaactatcatgatcttctaacatcaaactatattagccataatagcataaatagcagtgaccatccaataaaagtaacacaatattggaacttaaaactcgggaagtattggaaaattgtaacttcaccatatcataatctaatttgtacgattcaatataagccaaatgaagcagtagcacaattcatgacaaatctgtctataaaaatattctgttggattgatcaaatagaaattaaattgatagattccttattattaccttatggagatagtattattgcctatactttcatgccatccaaacaacctatattgattctttgtgttagtggtccagaggggctcaagctgattcttatccaatgggaccgagacaatttgcatataataaaaaatactgttattatggatttacatgtcgctgccgatatctcaaatattatacctattaataagactcacattttaatttgttcatcagaaatgggtttgtatgtcatatcattaaatgatatctatgacaataaaattcatattaataaattttatataaaaaaaattggaccaattttatcatggttccattcatttgagattttaccattattctataagattgatcccaaatttaaaaaatatgatcattgtgttctattttcggatggaagtgacacaatatattgtatactgagtgtaaataatagcgctgatttggataatattgaaattttctctttagcggccgtaaaaggtttaacatctattgcaccaagttatcatcaaaacgatgattttttaaataactttaatttggtagtaacatgtttcaataaatgtattgaaatcaccataaatcttaaagagatggtttatattgataaaatgatttcaaatgaagacggaaatcatgcatattatacgccaccttcaaaaagatcaattatttccacaagaactttgtgttcgatgactcagcctcaacagactggtatcatatctgtgaattccaaagaagagacctggataactagtgattcgataataagtcaagttcaaccaattccgtttttgtttactagaagaacacgtcagattaatcctgtaattcatgatttcaataggtataatagtattgtgtatgttaaggggaatgatttactaggtcttaatctattactggccacagacggtaaaactttgtcaagatgctatgttatagagacaaaacatttagaagactcatggtcaggagagcagtctcattaccattttttagaagttgatgatttattaccgaagaacaataggggaacattattcatgctcgtttatgacaactttgtggttcaattgactagtgaacagctgttaacacgatctttaataagtccatttgagacaaaaataatatttactgttacaccaaattgtaatcttgacaattttacgttccaagataataaattaattatatgggattctgaaaattgtagagtgtggtgtgttaacgatttatcacagatttttatttcggaatgtaaagaaatacaaacatttaataaattaattaaaaatcactctaatttttcattccacattacttctttgaaatccaatttagatgatcatactgtagttttgagaagtccaaagggaatattttcaataccatggagagattttgtatccaataacagcgataatataacattggttaaatctcttccgattcatgattttgttatgtgtaatgaaagtttatgtatatttttatattacaacaatgctcaaaagccaatgataaggataactgatttaactacaaagcatgtttctttctgggatcacatctctcttagttttaaatcaggggaaaaatttcaacttaagtcattaaatgaaatcacaatagctctttttagcacacgttgtttttatctgatttacttgaacgatttacatgacattgtttgtgaggaggtacaatttccattctttaatcgaacggctgtattgttggatttgttttataaccaatcgaataatacattattctgtttatatgatgacggtcttagaatactaaaactaacgtatctgagtcagtcaaggatggattatattttacttaaaactaaggacaaaaataaaatatttttgtatttggaaaagttaaatagattacttattgtccatcctcaaagaaaatattggtatttaatgaaattagaaaatggcacaattcgttccttagattcacaaatcttacaagttgagaaatatccattacaacaagtgattgagattaataataacacctctgactcttctttaatattaagatttcaaaattgtatcaaatacgtaacactcatggccaaaaataataaaattactgtcagaattttagattcattgaaaacaaatttatcatttcctaataataaacttgtacctacaaataatcaagatgtaattgctatgataggaacagataaagaacctaaaaatacagatagagatgtcactctgcatttgccagattccagccaatatgaaaatatcaagtgtaattttttcgaatatgctataaagaataataaaatagtagtgaatgaagatattcctctcaattggttaaaactgtcttcaataaaagactattttgtatttgttgatagtattgtaattaattcaccatcaggaatatctgtatatgtcaatttcaaatggccattctataaggaattgatctcaactcaaaagaaagagtcaaatagtcaagtgataaaagttaacgagaatatggtgcttgttaaaggttgtcaaagagaaggaaatatattcaagtatatttttgtatatgatgataaaatatttgatgttgtaagaaatccagaaaaatatcaggaagcttataataacaagtcgattgatttttgtagattagataaaagtaatgtgttatacacggattgtacaatgggtgattcgattaaaagaaaaatatggtcaaaagaaaataggttaactgaaaggtatcgatattataacggtgatacggtgttaacgcttacagatgattatgaatttaaaaatcaaaaaaacattaaagactacataatgggattacctgtagtgtttcctaaattaacaccagagcaatttaaattctgtcccatagccttagaaattcctgaagttgtttattcaaattttgatgcaagaaataaaatattatctatgctttccatagatggatcatttagacaatataaaaacgaatctgtttctcttactttagatgacaaagatgaaaacattactataaatatgatgagtcagtatatccacagaactaatgaaattagattaagtaagttttcagtaacaactaaaaatcagcaagggtttttttgtgggaacttacaagaaagtttggcagattggtagactgtaacagtagagaaccaaaaatatattaattatattaatattaacagactggatgaatttgtattcttggactcaattaatgagtaatgagatatttgggtagtgatgaagatacggttattaaatatttgcatttattatatataattgcaaacaaaaataaatatgtgataagttttcagtttagatacatttactagagtatttaaaagacattatatctgttttcgatgcgtgataatttaccaactgttggcacttgatagtatatacagatgtagatatagctatgatatcatttctatttgtaggtttgtaacatttatatcacaccctggagtcatcattgtctaacatacaactagaattacaacaaactactttcattggtaatctattcgtgatgggtttcaatcctcccaaagacaattcatgcaatcaagatttgcgacactttaatttttcacaatatctgtttgttttgaaaaactttagaaaatttcaatacagcatgtaaacaattgcatagcatcgcaccgtatcacattgaaagaccgctaatctacatatacattaaacaaaaagtttttactgaatagacagtgataaaaaacaaaatcgacctttctaggtattatagaaatgggcaagtattaagttatctgggataattgcttttaattaactaaatcattcaagttgctttcatttatccgtaagaatcagtcaagcagaagtccttttctacaagttagactttcatctactattagatctatgttttcgatcacgactgttacacaaccatctctagatactcagcatccgttacttctacttcaatcctctcatggggagaaatatatgtttgggaaagtcactgagggggctcaaagggctctaacagaaaataagattagaatctccaaattagaaaatatttttcttactggtgaattaaattggtcctctttaggtggattacctggtatgatcttaacaatagccgatcaaggtaaagataaattggtattaaattatggttcagaacttattaaatatgcagtttctacatggaggtattttgtgtttaggtttggaatttccttagatacaaatgtttccgggcagtataaggacaaattaataaccgttaatacgattaatattaaatcaggtgttacaaagcctaatcaaataatgggaaaatcttcctttggagaaaaagaacaaaaactattgaattcaattgtctctaatatgtttcctaagttgataccaactcatagatatgaaccttcttccgatccatatttaaatgttgatttaccaaatgttaataatatagagcatgagtcaatatgttatgaaatatgtttcaatccgataagaggtaagtttagagtagaagaagcaattaaattaggtgtaccaaaaggtccattgttcgctagattgtctaaaggtgaaactgttacattagaaaatggtaccattgttaaaccagaacaagttttagagaaggaaagaacattcgggaaaattttaattatcgatataccaaacgattcatacttagattctctgttttcgtactttgagaaatatgatatgaatgatttgaggtgtatatattacttcttggataataaagtgacaataaatgataatttaataacatttatggaattatttaataaggatcagggaaacaaaattaaacacgtggtttctcatcgtttgatatcaccaaataatatttcatttatgggtagtgctatcacaactttgaaattaaaagctttacaaaattatgcgtacaatttacctatcacaaatcaattgttatcaaaagagttttttgagtcctttgataaagagatacctgatggtgtatcactaattcaatctcaagaaagtgatataaaaaaatcattgataaaacctaacaatgttcatattcttactcaggataccacaattcaactagaaccatataccaaaggtgctgaaacagatccatgtaatatctttgaggataaaactagaaaattagataaacaatttccttggaaaaaaatttttaccaagcatttggaaccattaaatcttcaaaatgtcacttataaacgtttagttgaggaccaacttaatgttaacaattttaataataaaattgaaaaaagagaacatgttgagattgttactttgggtactggtagcgcgttaccatccaaatatagaaatgtagtatcaacactattaaaagtgccatttaaagatgttcatggtcatgtaacaaatagaaatattctacttaatgcaggtgagaacactattgggactatacgaagaatgttttccagttttgatatcagtacgttattcaaagatttaaaattaatctatttaagtcatcttcatgcagatcatcatttgggtatagttagtattttgaaagaatggtacacacataataaggaagatcaaagttctattatttatctaattactccttggcaatacaataaatttgttaatgaatggttaaaaatggaatttccagagattttatcaagaattaggtatattagttgtgagcacttggtgaaagacaaatttgtaagaatggagacacaaccaatctcgattaatgaatatgaaacttttactcagagatcaactgctaaactaaataaaaataatgttaatgatgacagagataataaaaaaaagaggaaattgaacctaaatcaaaattcttcctatagagatttagagacaatcaatgcaatgtacagggatcttcagatctttagatttgaaacatgtcgtgcaatccattgtaattgggcatactcaaatgctataactttcagtactaatgaagtaactaaaaaaccattcagggtatcatattcaggtgacacaagacccaatataaagaagtttgccgaagacattggatatggatctgatttattgattcatgaagctacattagataatgaattacaagaagatgctattaaaaagcgtcattgtactattaatgaagccattgaagtcagcaatgctatgaattgtgagaaattgattttgacacatttttcacaaaggtatcctaagtcaccttcaattgatggaaatattgaaattaaagctagagaatattgttttgcttttgatggtatgattattgactgggaaaatttaggtgaacagatgtctgttttaccttacttgaataaaatttttgcagaagatgctcaacgtgaagaagaggaggaaagagaagaaagcaaaacattatctatataattagacgtgttacaatatataagtagactctaagaacaagaatttattttcattaccataaaaatgtcgatccatatatatatatatgagatatatcaaataaatgaatatatgtatgtatgtgtatatgtgtatatgtatatgtatatgtacgcaagtaaaagtaataaattaaaagtaaaataaagtgatgattaactataagatgatctaagtgttggtaaacaattaattaaaaccagtaattaaacgttttaacacggtacttgcttcaacttcattttcgttaggagaagtattgaaactgatagaggtagttgtagatggatttgaaagctttcttggtgaaaataacatttttggtgatattttattacctaatgaaccagtcattgtttgttgaattaatggagtaaattgtaaagaatttttttttgtgagatggggtagctgtaatactattattatttatactatgatcatagatcctatctctgtcatctgtgtcatctcgaattaatgtagaacttggaacaccaactactaaattatttaaatgagttcttcttggtgtacttggttctttcaatagtggtgtatcaaagactgtaattttttttgaataatcgtttaattttctgatttcattactatatggatggtcgttagatttatttattgtttgaatccattgttcgtcatcgtttatcaacaatggatcaccaacagcacttttaaaagggaattgttcagtgcgtgctaccaatgatactgctgtgtcagtattgaccaatgtagatctattagttatgtattgttgttgttgttcatgttcttgtgcaggtatatttttatctgcacttaacaatatttcatccaatggaaccatatgatcatctatttccttaaaggacggtgttaatccagtcctaattaacatgttcgaattaactaaacgaggtgtctgcggaattgatactgttggtggtgaagagggatacatgttatgtgtcagttttttagcagatgattcaacactactggtaccatttctcatttttctcaacagagaaagaatttcatgtttaccattatcagggctttcaatgtcatcgtcaccttgaacttttaaattttctgtaggggtctctgattgactgttatcgttatcagaagctatacacgactgtgcttttgagatagacgctctcccatctgctccaatgcttaaagatagttttaatattgtattgcttattatactttgaacattattatccttttttttaaccgtagacgaggtaattggaggaggtgaacttagtaaagaataatcttcatcgaaatgttttgggatactttggaataaattgtctgatgcggagcttggtgtgaatggagtactcaccaagtctatatgattttgtttcttcggtggtgtactgaaatgcgcttttttggaattatggaaggctctagaagaggtaggatcattagtggaatttaactttctctttgccgatgtattcataatctttaccctcctttgttaaagttaatttcagtcagtctttgagataattggaacaaaaagaagcatgcatgcacaagaagtagtggaagcacaagaaaagctcagaaatatatcttacaactgttaatggcgaggacttttagacatacacattacatctcagagtgtgtcaaaatagcaaatagtcttatatttatagatctatgtctaatctcaaaacaagtattatcgtattgaaaaaagtacatgtatgtattatatcacaacaaataaataaaaaaatgtgaaaacttgacgcgtcaaccggcgtgtgtctttccaaattgggaaatttcatctttatcctaaagaggaaatatgagataagaaaatatgtagaaattgaggagaaaaaggacatttttcagtgtttaaagcaatattttggcatttgatcctgaattacatattctattggccattaacatgaagaattggctccatgcttggctgatgaggttgtcagttcttcatgttttgattggtagctaaccatttgtctctggaatgttcttttttttttttactttggtgtcgagggaaagagtcaattagttgttgcttgtttgttttgtgaatggtttttttaatgggggatagcttggatttgtttgatcatgaaacatcatttgacttaattacagtgtatactaaactaaggttttatcttttattaagtagtttttctttttttcagactactaaataagatttatatatgttagtttgtgacttgctgttaattcagaaactttttttttggaaaattattcaggatatttttgaaaaaaaaaaagtatatatatatatatatatatatatacatatgaacccatttaaattagttgaagttgttatggaacaggtcaattggttgaaactttatattgcatagttgtttcgctattctttagttaaattttcttctttttttttttggaatttctttataaaggtttgatagctggcataggacctaaaggggtgatgcccagtggatttattctagtgtgtgaacgagtgtaatgtaacttaatgtgttcaaaattggtagtatctttgaatgcaggataattccaatataagttccttagccataaatgaatcattgggtatccgtctcggatggtagttaaattgcatttgaaatgttgtacgtagactggatcaaatcttacaatagtggtgtataatctgacatcagcttcagttaactgattaccaacggtaaaaaaatcagataagactttctctgtgtcattagattttttttcaatcagctgtgtatactttttctctaagatattttcaatcttatccaaatgggtgaaaacatcgataacttgcctttcataaatttctgggttttctgcaaaaccagctttatatacaccattgttaacattattatagacccaagcattaaagtcattaatctcggtctctaaattttttggaaccaattttggtattttagatttttctccttctggaacaaattcctcaaatacgccagaatcaagtattcttatgattaaagaactttcgttgttgacaattgtgtttgtttgagtatcccatagcacaggaacagtgaaacgggctttataatttggatcactcttatagtataactctgataatctagtgaagccattaattggatcaaagtttgagtcaatgtttgacctttgtgaattgttggggattgtgcctacatgacagctaatgtcattttttgttgtgacgattccaccagctggtgtataaaattgagattgatcgacagtttgatcaattggcgtaggtgctagtctccaacctttttcatctaagtgccagtgtacaacagaaacaccaataacagatgtcaatccctttaagactcttgtaattaaggttctgtgagcccatggacatgctaaagagacatacaaccagtatctaccggtagcgggcttatagattggatgatctggtgagatcatttctcgaaaagaactcatttgtcttctaaaagcaccgtctttattgtcagcccactgtttagacatgattctattttccagatttgttttttcagttattgttggtttattgtatgatgtgaatgatccagtattacttatatacgataacaaggtatatactaatattattattaatttacattaaaaccatgaaaatagaaaataactgaagaaatctttcatcctctcatagatatgtacttacgtgtgtacacatacatacataaatatatatatatatatatatatatgaattttttttcgaactcctaaatccgctgtagcctgtgaacaaacgtttgagtttctcttctctcccctccttttccctataaatgtggagggggttggtattggcccttcaattggcccatgggcttattaaaatatgtttttttttcaccttttttcttattaattttttttgttgcaattttctttgtaataaattagtaatggaactacaagcatggttaccaagagaatggctgaggtgtctttggattagtatgtttacatttttaaaacatttttcttagtggtggtgtgattagattctcaacgcaaatgtgctgtctgttttgtttcttaatatggaattgttggtttatgagatgctagatggtggtctggataaaacaaaatcctttgtcttttccaacaatagcagagtattacacaattattagtgtaatattaaaagttttatcaatggaaacagatatggaaattgaattatcaatctcagaagggtcaaaataaaagataacacatttgtaaatcagttattgtatatgtagtatactgagtttttcaagataccaaacagtttaatgctgagtaattttttttacatatcactaaatatcaatagtaattatttagttaatgttgttttttctggtcagtgtatgaactctactcaatatccatatatatgtatatatataaatcaaatggtcttttcacatcctctttctattttatttatattttgttatactgtttttgtatttcagtattgtctataaagaagaaaagggaagaatgttacattaatttttgtattttattaagtatataataattatagaatataatcgagaatggaagtgtgcccaggttatccaatacataaagatccttgttttcaacagtaattgtgttatttatttgtatgtatttatttctacacgttatatacagaaggtcaacaacttttaattacaataaagttatcaataaacccatcacttaaccgagactattgatttcagcaccaatttagacacacagccttatgagtaaatattcatattatcataatatatcataactttaatgattctggatagttttttcttttttttttttggtttactcttatattcttagaaagttctgttctaatttgtacacataatgtaaatgattgcatttgtgtttcagatcaaaataaaatgatattttagatttggtagatcattttatttggaagaaaaaaagaaaatctttttaaagatgtcgttttgagttttaaatgtaaaaaaatattctggaaaagttatattttgaacaaaagttaagagattgaaataaagaactttaaagacgatatagagtgttacttaggaatgttcatgttaggaataagcgcctgtactcattggatatatagtaaacattctcaatattatattaaacagatttagtacacaaaattataacaaagttcttcactttctttctctatatacaacatagaaataataatatacaaagattgtaaataagataaaaataatgtattatgaaatccttggctttatatatgttaacattcagccattttcctctacgaacagtaagatatttaataaacaaactcaacaactttcggtaacctctcaacaattattactcaacaatttatcgtttagtgtctgctaaaatcttatttttctatctatttcattatagaacattatatttcattatagaacattctatttcaacagttcaatcatatagaaacacgattaacaaattaaacctatcaagaataactaatagatgaactaaaaagtatttttaatcacaattctatcaagattgatacaagaaattgtgcctaagaaatatatgagaataaattttttgtgctaaagtccaatatatatatataaggacaagataaaaaaaatatgaaaaaacaaatcttggtaacatggttctcagttttggacacatgctgcattgattattagtaactatttgttttataataaggtacattcaattaccggggtaatcgtagattacgaagatgcattataagaaaacacattacttgctataaataaatagcaatgctgattttttaatgtatttcataataatgaataaaaagagtcagcaagcaataatggccagatcaaaaggcaaggacttgctactggaaaccaaaggaataaagaaagtgacctacttgaactaatacactcaacagatgacaaaaaataaaagaagaatgagaaaaaaaaaagagattcttttagattggtattaataaaaaatattccttgtttaacttaaacgatgataacacagaaacatcagtatttatggattctcttactgataatcaaaactacaagcaggagaatgtagctatgtatattaagaaaaaaaataatatatacatatactttttgatactctaataaataaataaataaaaaataagtagaagaaagaaaaataacataatgttttaatgcaaaataacaaaattctaacatacgtaaattaaatatcacattacattattattattattaatgttattatttagtattttataagaaatttcttattctagcttgattggtatattccttttttattatcttttcctttttatttttttttattgatttgttacataatctaaaggcagagaatttaacaatgtatatacatattaatctaacatctttccttacacaatgatattctataatcatcgtagttcaagaagttcgtttgttttcgatatcttgagataacatcaaaatttgtaaaggtactcccttcccctttaaagaaataatataaagtgataaaaaaaaaaaaagaggaaaaagaggaaaaagaggaaaaggagaaaaaagagtaaggcaaaactgcaataagtaacacaagatccttttatgagagtttgactatctttacagtcagaattaacactcaatactatgaaaagaaaacttggttgtaaagaaagtaactaaatttttaaaatcaacatcatatttacaacaataatgttaaaacgattattgagtaggccgttaacaaaatgtcatttcagtcatgtcagacgactgaaatatgaagatttacacaacccgtcaactcgatctaatgggagaattccaattagggaatatataaaatggttgaataggccttacataatggtctgggacgattttttcaattcaaaaacattaaaaagcgatgtaacgatctgtcatgacatattagagaatcatggagaggggatcacaaattttgagccattttttagtgaagccatggctaaatggttatggacaacctatacgttgaatgactacccgtatttcgatttgaatattgtaactgttttcacgaatctgccaaaggctttagacacatgtagtcacacaatgaaattttttaaggatgttttgcagagtgaacagtttacaagaatcaattatttcatggtccctttgtatagaatggatggacacatatctgaggaacaattgttatatagaagaattccggggaaagtacagatcataaatgatatcaaagtatcaccatttcatgtattaggtgtgaaaaacgatccttcaaataccttctgggtgcaagaccctgtgtatattattcttatggatgatattataaagtatatggcacaggatcagattagaatcaattccgaaggtgtgctagaacaaggatatttaagatttaattcaagtggagattattttagaaaagaatatcataaagaaattgatcccttatgttcacaggcaataaatattttagacaacactattgacagcaccacagggattgaacaatatatacctagtcagttaatccagttatttgaaattattagttcgataatacctgagtatcgtatatttgcattggatttacaaagagactcgtataaagattataccagttggtggttaaagacctggtataacaaattgacttattggggtaatagtcatgacgattgcataacagacccaaatgttttattaataccggagaaagaagaacaatggaatcataccatgtataaacgaatgacaaacaatgtgacatcaagagatttaatctcctttacgacgaattttaaacaaatcaagaaaatatgcttgaattttaatcccaatattaatgctgtaaaattacaatcactatatcaatttatgaatcagtggtatcaagatgaattcaatgctataccagatgcatctatttactggaaacaactgaggggaagccaactgaaacttataatgtatcatctagtgtaatctattttattgaggaagaaagaagataaagaaaaataaaacgacttcacaaaggcgctagcaacaacgtagcaagaatagcggaatttgatgtatccttttttttttttttttttttttcgtttcttctttttttcttgttgagaataatcaagacattgagtataaagggggggggggaaggaaaaggttgttacttaaacatggtaaggtagattcaactatacaataaaggttttttgaataaaagctgcaatgataacaacagttgttgccaaatatagataatttcaaatattatttagttattagttttacaaaaaaaaagaagcagaaaaaaacaagaacgttaagctttaaaatagaaaaaaaagcctaattaataagacaaattcatctttttttttgtccatttatgactgaccaaaaggaaattaaggaagatttgggaaaatccaaatcaagggcacatgtccttcaaatcgatcgagactattttaatccctataatggatcacattggagcatatccacattcctttatgacatggctatgtgcttgttcaatatcatgtttacaatattttttagagaaattaaggttcgtggtgcatgcaatatgcctcaacaaggtgtccccacaatcttggtatgtgccccacatgccaatcaattcattgatcccagtcttgtgatgttggaaacacggaaattgactagtggtagaggtagacaggcatgttttgtgactgcagaatccagtatgaaaatgaaaattgttggattttttggaagaattatgggtagtatacctgttcctcgtgcccaagattatttagaacctgtggatccaaacatcgaaatatattgtcctgattttgataatgaaccaaccttgattgaaggccgttgtatagaagacccatctaaatctccagagtttaccactcacttcatggccaaatccttgttgggtttaccagattatttagctaatgcccaaattaaagaggtcgtagatgataaaacaataattctttcatctccattcaaatcatctaatcctcgcgtagcaaaattattaaaagatggtacaaattttaaatatgctaaaaaagttgataactcaaaagttttccaaaatgtattcaatcatttacactcaagtggcactgttggcatttttcctgaaggtgggtctcatgacagaccatctctgttaccaatcaaagcgggggtagccatcatggcattgggtgctgctgctgctgacccaaatatgaaggtttatgtggttcctgttgggttacattatttccatagacacaaatttagatccagagctgttattgaatatggtgaaccaatcattgtggatggaaccatgggtcaacaatatttggaatctccaagggaaaccacttcaacattgttaaataaaatcactgaatcactatattccgttactgagaatgcaccagactatgatactttaatgaccatccaagctgccagaaggttatttcaatcatatgaaatacctgaacacagattatcattacctttaattgtggaaattaatagacgtttgttagttggatattctaaatacaaagaggatcctagaatcatcaaattgaaagaaatggttactgcttataatgatatattgtattcttatggactaaaagatcaccaagttgaaaaattacaatcttctacaactaaagatgttatccgctgtttttttcttttaatcgaaagattagccaggttacttgtatttttcgttttatcgttaccaggttcggttttatttactcccatcttcattgtcagtaatgtttattccaagaaaaaacaacgtgaggggttaaagaaatctgtggtgaaattgaaaggtttagatttattggctacttggaagatcattgtagctttatgtttggcacctatcctttatgttacatattctctaatcctaatttatacacaatggctatgggtaccttcaataatattaaattctacaattggtcaatttatctatttttactcaattctggtattaaccacatattctagtctaaaaacaggtgagattggaatagatttgttgaaatcattgcgtccattatttgtttcattgttttatccaaatgacaagattacaaaactaaaatctatgaggaaagaattgtcacatgagatcacacatatctgtgatgagttagggcctactgtattcccagattatgagaaatttaaaaccttgaatgattttgagggaatggcctctttagattcaactttgaagcccgtacaacccagaagccgttcaagttcaattcattctattgggtcaatcttatctaatgctttatcccgagtcaattctcgtggttccctatcagatattccaattttccatgactcaagaccgccaagttacattgcaggttccacaacaaacagagaagatgtcgatagcagtgatgaagaggaattcgaagatgagacgcattgtaatgaggagaatgctagtgagttaagggctagaaaccaatcaaagattactaatttaattagagagaaatggaaggaccaagattaatataaatattgatgcatagtaaatgattagtactaaacacatggaaattatttaattaatattcttgtatataagatatgtatgtgtgagcatatatatatctcactctttatgcacattgctgttttacaaaagtaacatatttagaagtagtttacagatagtctatatctatctatctatatatatatatgtaggttttagatttaattcagtcttcacctagtggaatttcatctttcaatattttatttaatttgactctaatctcagtggatgcatcacctcttaatacatcagaaacgaaaccaatgtcacaatctaactgaaccatctccaaagcccccttaagcacaccgcatataatgttagaataccataattgtttcttagcatcatgtggaaggtctacaaattcagccaacggattttctaccaaaattaggctaaatgtatctttattactactccaattatctactactggtgttatattaagaaatactttgaatgctactttagtgattacttcactggtcattatcatgtttggacaacgtggtaatgcagtccttgccaaaaaatcctcaattaaccttacaccaatattatatcccatagaaaataaattttcattgatcttcatgtaatcattattaaaatcttgacataattgctgtacaataacaccatatgtcattatgaataattctgcgttaactttttcaattttattcttccatatatcgtcaccaaaagttttaaaaaattttgattggttagcacctgttttagatgataaattagcggcatgtgtggaaagagaggaggaccttgatttagacatggttaaagtagttaaaacttcttatgagatataaaacgaaaacacgataaaaaaagggagataattaaaactgattaattataaagtaatttatgttatattatcttgctgctttgttctggttctatacttttgtcagttgatactcgtttaattgacagcagtttcactctttgattatatactgtggatataacttagatgaacatattaaaagggaatgtttaaaaataaaaacaaaaaaaaatcgttccaaaaaaatatattccgcgtagttttcgtacggaatacttctaatgaaatagatcaagtgtcacaaataataaacaacacatgcaatggcacaaacttgttgaaggataagagaagtgttttctttgaattatatagttaagatctatatggatgtgttaacattggtaacttattttctcttgaatgctacaaaaacaaaacaataaacacacacacacacatatatatataatgaggaatttaaagttcaatatttctttgaaaacaatttatttcatagtaatgactgaaaagacactaatctatttactaattaataaactgatataataagcgttggatattttcataatgtattttataggtttatggtttacaaatattcttttttcctaaacagaacattttatttgttttatttatttgtgaaactcttctatccaatacccttgtgagctcagatatgtattcaagattgtatagggctacttataagaccttcaaaatataaaaataaaataaataataataaaaggtttgattaggaaaatagttcatacaactttttttttgttaatccttaaaattttaactcctgaattttataaagtcgaatctgtctatctatctatctacatattatttagtgatatactcaatagagattgtcagttgtaatatattgaagattatagtctgtgaacatttgaaatagaaaacatactgtaaatcaattttaaatagtatttttgatatatatatatatatgtatatattctttacaaatcatcaaaagacatttttttttcttgagaaatttctaattactttcagaatatccgataaatttgataaaaatagtacatataatttacttattttatttaattagataaattgcaaagtatatatccaaaagtggagaaaactaataaccacatatatctatatagtattaggtcataatatatcataacatcttttatatatttttcatgatcattaaacaaaaaaaaaactatattatttttttttttccaaaataaaacagtttactaagttagttgtcagtctttgtatgctaacctcttccattagataaaaaatcatttatttttatgttgggtaaataagcaagtaactaactgaatacttgctgatttaaccatatctacttagtcaatcttgctcatcataataccattacgtctctgatcattagataccatgcatacacacttttaatgtctcgtgaaaagtgatatatagaaacccctgcgtaaatcactctatacggatacacagttttggaatcacaaattttgatgaaatttttgtgtgagaaaaaaaagaaaaacaaattgtgtgacaaaaagacaaaatatgctgattgatgatgaataatgaagagagaaccatcatgagtaatgaacagtggaatctgtatctccgaagaatttgactaattgtggtcggaaagaacctacgatgccatgctgattctattccacaataattgagttaaaaaactattaacagaaaatctaaaggatagaactgatgtaatagtaattgcattctgccataccattttcctcggtctttcataatcggtatatgacagaacctactcaaacttttacacaggatttctttattcttaattgaactgtggggtctattaacgatattgataaactatactctatattatcactcatatttactcttatctgactctgaatgagatatatccacaatttatttgatatgaatatttattcatgaagaattgtatttatacaagtatacacacatataaagggatactttagatcttgcaccaagttattagttgaagattttcaaatttaagtatatcttttctgtattttgttgatgcccaagcatctaacaataataaaccgcataatcaatttttgatacatatatacagacatacacatacacatacaaattaattctaaattaatttccaactatttaatattatagcaaaaataatatatatatatatatatatatatacaaagaaatgagtcttcctttaatattaagttccaatacacatggtgaaatccatttatttgttgggacaggttcaaatgtatctgttcatgaagatcatagagtttgttcattaacaattaagagattacgtagagtcttaacaacaggtgctattccaatagtcataaatccatctcatcctactcatatcaatgcaatcttaaacgagtttaaatctaaagctaacttctccattcaaatcattgatcgtcaagtgagattgaatgatttaaccactttaggtagaaatattacgtctggtgtagtagataggttatttattaaccttggaagtgatcaattatcattagttcaaccaatatatctgcaatgtgttaaattgagaatacccatcaatacttaccaacaaccagaatattctacatttacattgctacctacttacactgatccaaaaggctctggtttacaaatctctgtaactactaatgggaaaggatatattttagatgaaagaattaaaagagatattgttaataatttaccagcaaatatctctgaagttatatcaaatatggcatttttaagagatcagttaattcaacaacataattcagtactcttaagggaaaaatatattgagacgccattatctttacctaaattaggatatggcttagataatgatccatgggattcacacaaatttaaccaattgatcaaagagtttgacatgactaaaaatgatcaaagacatagaagatgtagatggttatctcaaatcatggaatattatccactatccaaattggataaaataacattagatgatttggaagcattaacagataaggatagtgcttcagaaattcctatagaattagtatctgaaaggaaaaaagagggtagaatatctcttgttggtagtggtccaggttctgtctctatgcttactctgggtgcattacatgaaattaaaactgctgatttaatactttcagataaactggtaccacaagaggtgctagctttggtaccaaaccatacaaaattaataattgcaaaaaaattcccaggtaatgcagaaaaggctcaagccgaatttctgaatcttggtttggaagcattgaaacaaggacttcacgtcattagattaaaacaaggtgatccctacatatttggtcgtggtggagaagaatatttatggttcaaagaaagaggattcactccaatggtcttaccaggtatatcatcatctttggcatcgacagttgcagcacaaataccggctacccaacgtggtatagcagatcaggtactgatatgtacaggtactggacgtaagggtactattcctgaagtgcctgaatatgtaccatcaaggactacagtatttctaatggcattacatagagcagaaattttacagaagtccttactggagaagaagtgggatccagaggtacctcttgccattgtggagagagcctcttgtcctgaccaacgtgttactagaactaagttaaagtatttacaacaaaccgtggaagaaattggttcaagaccgcctggattaattgttataggccacgcagtaaatcagctaacggacgatgctaataactttactgaaacttttactcatattatagatgaaggatttaatgatgttgagatagatgcaaccaatgtaaacttcactatttgaaaggaacaaaaatatcaaaattagatgattaaataataataataataataataaaatatttatagagttcatcatgtatatatgaaagacattaaccactaataatgcataagtttcatttatacacatatatacatgtctagatacagacactccttcataagtatacacatgaataacgtttaaaaactttatgtttgttctgttacttttttgctaaattaagttgctgttacttacataataataatgatgagtcatcctttctacatcatgacataatcatcacgtcgaccaaagattccaaacaaaataaaaaaaaatagaaacaaaaaagggaagaaaaaagtaaatcccaaacctttgatttaataatactgggtgaaacttacgtaaaaactcgagttcaagctttctcaaaatatgaaaaagatggaatattgtgagattcatactatttaataacatattatcgacaaaattgaaatagaacaagaataattactcgagacaacgatgttcagaagacttctccatacaagatctggccaaagtattgcctttgcctttgatatagatggtgtcctattaagagggtcagaaccaattgctagagctggtcaggcgttacgcattctaaatgagaacaagatcccttatgttttactaaccaatggtgggggttctttggaacatgaaagaacccagtttatttcagaaaaattgcaagcacagatctctcctttacagattatacagtgccacactcccttcaagactttagtccccaaatataaacgaattttagctgtagggacacctagtgtaaggaatgtggcggagaactatggtttcaaggaagtagtacacccaaacgatattgtgagatataacccagacattacgccattttcaggactatcaccagaccaattacaaaaattagccaaaaatattcctgatatagacacggttccatttgatgcagtgttagtgttcaatgatccaagaaattgggcaggagatttacaaatcatatctgatttactgaatagtgaacgtggaatgcttaatactatgagacaacaaaatagttccatatcatcggttcccatatattttacgtgtaatgatttattatgggcgaatccatataagttaaatagatttggtcaaggtgcatttagaaaattagtgcatacattgtacaagtcattgaatccaggacaaaaattaagtgattttattctggggaaacccacgaaactgacatatgattttgcacaccatgttttaattgactggaataataaattacagaatagtgataatatggacaaattatacgatattgattctaacattcaacaaatattacctcctttaggggaggaatgtccgaatgaaaaatccccatttcagggcaatgtgtttatggttggtgacaaccctgcaagtgatatcactggagcacaaaactatggttggaagagttgtttagtcaaaacaggtgtataccgtgaaggagataaactgggccatctaaagccaacaatgatcgtggaagatgtttgtgaagcagtgctaactgcattagacaagtatcatagttagatttatttaacctcatactttataaacatagttgaaagaaagtttaaataaatctttttctttttctttttgtttttcttttattttttctcgcattttttggtaaacttgtagacatattatgacacctaatctaactttctttaccttgcacgtaaaatgaacagaaccaaggctctccttcagcctcgaccccaactccagttccacctcaaaatctgcagaaacagtttggcaccttcaaattcttcgagagattttccaaaacaaaataaaataaaataaaaagaaacgacagcttttctgtcattcacgtgctcgaaagtctcgacctcccaattttttttcgcttttcttatttttccctttccttcctccattcccttttgatgtttttataatagcaaagtgaaaaattaagcatttttatctgtcaattgatcggcatagcagtatcactcaatatacacatttatatacatatttatgcatgtatacatagatatatacgcaagtgataagtggattctatattattaacaacttctgtttcaggtataggatattaatattactttacaatcgaacaaataaacagttcacatatacatacatatatatattttagcatccgttattttattaagttatacaacctccatcctttccatttttgaacttaccagtatatcaaatatataacgtatacatagaggaacatgtcgaaagaggaggccattttcaggtcagctgatatgacctatgtccagttatatattccgttagaaatatcaagagaaattgctatgctattaggaaagctaggtcttcttatgttcagagacttaaatttggatctaactgattttcaaagaggttatgtttcacagttgagaagatttgacgataaagaaaggaacctgtcctttttgaaagagatgttaacttcacatagtgaagctgtctggcactcaaacagtcattcttatgtgtctcatgacattgctgtcaaagatttggatttctattctatcgatcaaattaatgaatatatggaagatatagctgttgtatcggaaagagtgaaacaattagatgagtcatatggtaatgtgcaaagaaaactgaacgatcttttagagaacagatatgtgatatctaaatgctcaagattttttcaaataaacccaggatttgtaggaaggatatcaagagacttaaatgatcaaaatgaattagatgtagaagattttgccctttccagtgaagagaatctagtgtcgaataccctccacaataacactaacaacaacagtagtagtagtcctaatttagataataattcacttgatagttttgagatacatgatgaaaatgatagctttggtaatgataacgaattttttatgttagaaaatgggttacatcatcaacatatgattgtaggctcaattaatagaagtaaagtggaacttttgaacaggatcctgtttagattgttacgtggtaacctatatttccaaaatatccctattgaagaacctttattagaaaatgatactccagtggaaaaagattgttttatgatattcactcatggtgaagtattagttacgaaagttaaaagagttattgattcattgaatggtaaaactgtactcatggataaagatcatttcaccacaatgaaaaatcttaataaccgaattgaagagatggaacatatcctaacttccacagaacaagctttacacacagaattattggtagtcaatgatcaaatatcattctggaatgccataatcaagcgtgaaaaatatgtctatgccacactaaatcttttcagacaagaaacccatggccttgtagcagagggttggattccatcttcggatttgaatttcttatccgatagtttgaaggatcaaattgaaatattaggctcagaatatagtgctgtagtaaccgttatccatactaataaattaccaccaactttttatagaactaataaatttactgcagctgcacaagctatcgtggactcctatggaatttccacatacaaagaagttaatcccggtctggccactattgtcactttcccctttatgtttgccatcatgtttggtgatgctggtcacgggttcatagtatttttgattgctatgtatttaatattgaatgaatctaaatttgaagtaatgaaacgtggagaaatgtttgatatggcatatagtggtagatacatccttgtaatgatgggtcttttctcgatttttaccgggctcatgtataacgatattttctccttatcaatgaccttctttaagtctggctgggaatggccttcaagtttcaaagaaggtactttagtagaagccaagaaagtagggatttacccctttggactcgattatgcttggcatggtactgataatgggttgatcttttcaaactcatataaaatgaaactgtccgttttaatggggtttgctcacatgacttattctctatgtttctcatacgtcaactataaacacaataattctaggatagatattatcggtaacttcataccgagctttttatttatgcaatccatatttggttacctctcctgggcaatcatatataaatggtccaaagattggattaaagatggaaaacctgcaccaggtctattaaacatgcttattaacatgtttttagctccaggtaaaattgatgatccattatataaaggtcaagcagccttgcaacaaattcttttgattatcgcagtagtatgtgtaccatggcttttattatataagcctttaactttaaggaaaatgaataatgaagcctcaagaagaggttaccaaaatattcatgatgagcaaatcaacgaggctctattagatacccaaagagattccactgagagtgatgcaatgattattacagattttgaaagcgatgagaatttgcatggtaacaatggtgaatttaattttggtgatatcatgattcaacaagtcattcataccatagaattttgtttgaactgtatctcacatactgcttcatatttacgtctttgggctttatcgttagctcatgctcagctatcaagtgttctatgggatatgactatacgtaattcattctcttccaaaaattctggttccattttatccgttatatctgttgtatttttgtttggaatgtggtttactttgactttttgtatcttagtgtgtatggaagggacttctgctatgctacatgcattaagattacattgggttgaagccatgtccaaattttttgaaggggagggtcatgcatatgaaccattctcctttgcctcaattgaataaatacatattaaaacaaaaaaaatatttgacagattgtaatattatatatatatatacatatacctgtgtgtattgaatatatattttggttaagagaagaataaaaaaagatattcaagtcgttaaaataataaagatatataagttaatacacatatatatataattagatataattagaaataaatagggagaggtttataaaaagagatttttcaaataaatcaattcagtgaaaacctctgctaactttatctaaaacatcatcataagaaacttcggagaagtcagtaccttgaatatcagaagcaacaccattcaaagactttctcaaagcatccttagaagaagcataaaccatcttagatctgattggagcagtatctggagaccaggtgaagaaaacaatcttagatcttttaccttcatttggaatttcatattcaaaatcatagacagcgtataaacattcgttttctggcaacttttctaagaaagcgtcataagaagaatcagtggaagtttctttaacaacaatttgggtcttgtcatcatttaagccaaataagataaacttatatttcttacctaattttaagtcgttaaaggcagttaaagattcatcagcaacagtaacactatattcaaatttcaatacttttttattgtaattgatttatatttgtatttaatatgtattaagaagaaggaatgcatttaaaacatacaataccagaggaaaagacgggctcgacctcaaatgatcataaacttttgtgttatttccaagataggaatattcatacaataatgggattgcatatttcaattactcaaatttaatacatatatactaatatgttagtaaaagttacatctccaaaccctttatatcaaataaatagaagttgtgcaaaaggtaacaattcgcattagtcataatacaaatgatctcctaacatacccagatctagacatttttaatatatgtaatcaattgaattttctttggaggaaggctattcggtttgaatccaaaccaagaggagaagactttagggaggagcccttattaaaaagttgtttattaaataatggctagtttatagtttgtgtctattaaactgtttgaatgtttttttactcatgttcattttgcttctatggaatttttcacaaagacaggggaacttgtctccgttcgtactcaatgatatgagcaacagatagtttcgagttgtacaaaagccacagttgcaaataaataagtgccacaaaattttctaatgatatgacactagaaacaatctgttactttaaaacattagaggataagtgaattcaaccagttgagcccagttataacgatttgcttcattttgtatttatgaaagttatagttcacacctctaagacctacaaaatttctttctttctttttatatatatttctttatatggtatctatataatacatgtcttaagatatattaataatcgaatatacatacatatatacatacataaatattttagaacagatcattcaacggttattgttattcaatttttgaacaaaggcattcttggccatttcaatcagagcatctaattcaccactgcgttcacacatactgtagaataaactttccttatttaacaataaggaatatggatgatcatactcttttacttcaccagcatccatcaccaaaattttatcataatcaataacagatcgtagacgatgtgcgattgtaagaatagtactttcgttaaattcttgtctaatggtagcttgtacctttgcatcactatcataatcaatagaggctgtagcttcatctaataataaaatctttggagaacgcaataaggaacgggcaagacacattaattgtctttgaccttgagatagatttccaccaccttctgtaacttcattagacaaatctaagaatctgttaacattaactgaagctacggaagtctgatcattggcataattattattaccatttctgttttcagtgtaatattgctccaactcttcaggcgtaaccaaattaacacgtctcaacgcagcaaatatagctttatcactatactcatcatatggatctaaattgctttttatagtacctgcaaataacgtaggatcttgtggaataatagtaatggcacgacgtagcatggtcaaatcaatagaagtgatatcataattatcaattttaatatatcccgtttcaggatcaaggaatctaaacagtgcagtaatgatggttgatttaccagcaccagtccttccaactaccccaactttagatcctggatcaacagtaaatgaaacattcttaataacacgtggcaatttcggagcataacgcaacgataagttattgacttctattttaccatcatttggccattgaattggtggtgtttgaataattttattttgatgcgctacatactcttctttgtccacattcatgtattcctttaatctttcaacagaattcatattcatttccacttcactatagaacctaaccaaccaaagagcatcttcagtaaatgcaatagcatatgttagtgagatacctgctaaaccagcatcaatgttcttaatatcagcaaggataaatataccggcaccaaatacaactaacgctccaataatatcaattctgaaagctagccaacgatttgctacccacaagtaaaagaatggtctgttattttcatctatcttttgaagattttcttgaagaaacctactttcatcaccaaaggctcgaatagtagtaacaccaaccaaagtctcagagaaatgctgataaattggtgactttgttgtagaatctagtctctttaattcacgggaacctgccatgtaaaagtaaccaacaaggtaatataagatacctaccataattgcaatagaaataaattgtggtgtaataaatgtaattaacataactgttgtaacacaacccattaaagtgcaaatggcaccatgcaaataaggtgttaattgttgatctgttgactcaatatccttggagaaacggttcatgattctaccaataggtgtggtatcaaaaaatcttaatttcgcacgtaaaactgtatgcaataatcttttaaagatatctctggaagcataaataccatataaataggtaaggaatagcttaaaaatagcaagagacgattgagaaacaccaaacaacaaataaatcagtaaataatacatagtagaatgattattcttaattaaaacatgggtatcagacgtggaattagtttgggcagtattaaaaatagttgtatcaattgaactagatggaatactagaatagaatttaatattaaatggattttttgaaacaaaaatatgcttaacaaaagctacaacattatcactaggtaaaatagcagcccatttacgtagccaccatgattgaccaatctggaaaatttctggaataaagaaaagaattaacatatatgaaacaacttttaacccaccaaatgcatctaaaaaccatttgtaaacatctaaactaacaataccttcagccttagtctcttcttcaattagtttaccatcatcttcattaattttagttctttctgtactctcagtgttttctttcttacctgtctcagtatccattttctttgccattaaagtatttattttgagtgtaggatggttaacatcattactaatactagttaatgatgcagctctagataaaatgctacttttaactaattcatcttctcctaacacacctctatctaataattccattggcgttccctgttccttgacttcaccattctctaagagaacaacaagatcagcattcttcaaagtcaatgcaatattatgagacaccaaaatacatgttctattttccatcaatggaccactgatacaattctcatatatccaagatgctgtatgagcatccacggcacttaaacaatcatctaagagaacatgttttgcatcagaatatagagccctagccaaagagattctttgcttttgtccaccagacaatgtaatacccttttcaccaatttctgttttatcaccagctttcaaaattttaaaatcacgaactaacccacatgcattaataacagcttcatatctggtcttatcaaagggacgattgaagataatattatttctaactgtgtcatttagtaaccaagcagcttgagaacagtaggcgatagagttggtaagcccatctgaatcaggtactaaagcttgtctagcttctaaagatggcactataattttaccttttaacaaatgcatctcacctaataaagccattaataatgaagttttaccagagccagtagcaccaatgactacatttaatttaccgatcttaaaatcaatatttaaatttcttaatttaaatgttgattctttatcatcccatgcaacagtagtgttttcaaaagctagtttattccctcttggagcaatagttaactgttgatatttttctgtatccatttcttctaagaattcagctactctatctaaagaaattttagattgaataacaaaacttaacatatcagataacctatctaatggatcccttaacaaagcaaataaagataaagctgtgaatgcgattggagtagtcaatggcatcttctgaacataaatatagtaagagaaggcagctgtagtaacaagagttggagtgataaaccaaacaaagccacctgcaccccaataaatagttcttttgatcaaatattttaattctttatctctaatttcattgatctccttctcaaaattatcttcccacgaaaaaaatttaataatcctaattgcttgaaatgcttcattcaatttttgtatacgtttatctgtgacagctaaagtcttcttttgtaaatcaccgatgataatagccaatttgaaattgattggaaccataattaagataactattgttccaatgattgcagagagtccaattagattgtataacaaagtcaatgcaattattgtcatcactacggcttccacaaaagaatgtagataaccacaaatttctgagattttaaacgcatcaatagccatcaaattgataatagtacccaattgagccttggaagaggattcctcatcaccatcaaaatgatccttttgatttcttttttgtggatcttcctcaacaacagtaactccagtattttcatcagcgttttgatcctgttcttttttacttgtagtagaaatttttcttcttaaagcctttgaataaatttcagatataataatactcttcattctaatacagactcttctacctaaaaataaagcctgaccgttagcaattgctacaaagattttacaaacaaacattagaatgacataaagccaggcaaggttccttggagccgaagattggtcctcaacatattccaagattcttttcagaaggatggttggtataaaagagataatacttgcgagcaaggcccatacaccttgtaataagaaataatcagagaagaaagataataatttgaaagtaaaacttctttttttaccagttggggcaaattttttacaataatttttaaaatttttgttaacaaagatcgagtaatcttctagtttcaaaccccaaacatctttcattgtaatataatgattgtttgctacccagacgaacttatccagccacgaccaacacacaaaggaagcaatagaggtggtagattcaggagatggtataatatcttcttcagtttgatacagaactccgaaatcatttttaatgggagaaaatagtaacaataatactagtatcaaatcgatccaaaattgaatagtatagtaatttttgattagtggagatttaatatgaccaataagaattgaacggaatgggaatatattaaaagtgaaaccgatcaaatatgaaaggaatgataagctccaaatattacccatatatttattgataaaccacttattttggttagcattaaaacatctcatagttattaaactgaataaaatagaccaaaggattacatttatcaaattctgattcttaatactaccataattgaagtctattagatcttgatatgaagaagacttcaataaaatgactaaatggaacaataattgtgataaaaccaagatacactctaaaaccaaccccattttttccattgggccacgactaacaatagtaactttaccatgtggctcaccattcaattttattaatttcaagttttctatagaaaaatgacgatcagttaaagattgttcattattgttatcattaatattattgttattttcagtataagaataattatgattattaatgttatgattagtcagtgataataaactttgtgattctgggtcatttatgttaattgtatcatgatgagacaaagatagtatttcatcaattggatttttctttttaacttttaatacattgaactgataatagttagacaaaatattataagcaataataattattaaaactgcacttaagtataagggcaccatataatttataacataggccctaccacacggcgtgacgtcatcgtaatcccaaaagtgacaactttttgtatagttcctcattaaagaaagtatgttataattatcactactgttttccatattcatcacccacggaaacaagcagaatgacaaacactaagaaagaggatattatatataaatgtggttgaaaattaaacagaggtgaatactctggttaggatctgtgaaaatatacaaacctctaacgaatataaattagctaatacaaatgcatacaaaaacactcttcatatatatgtatatatgtatatgtatatatatatatatattataattccatatcgtttattatcttatcaaacaatgtcatctcacacttagcctaaatttctcaaatgatggtgatggaatgaaaagtaaaaagtgaaaataaaaaaaaaaaagaaaagaaaaggaaaaaatgtgacaaaaagggaaaaatacaaaaaaaattttcattttttttttgtttggattgacttcttcctacctatccctatggtcaattagtctatccgtctatgtatccctgtctcttaatcctttctaggttcttatgcaactgtgactgattcatgcgtgaacatatgcgttctgatattcaaatatagcatgataagatatttgcagaatagagttagactatgtcattatatggaatgactcaatggatagatgccgatagactacttctttttatttttattttcattttttttttaaagtgtacaaaaattatctgacagaatagacgcctattgaagattatatttcatcacttttaaataaaagtttgctacatctttcttaacatcgcttacttggttctgacttggaaaactcaggttaaccaacttatcaagtatacagatatccatctttccatgtaacggtttttataatacaacaactgattaccaatgatattttctgtatcgcagaccccgaccatgaaccatggttcattatcaattaaatcaatattcaatacaaaccaactaggcaatctagaatttttctttaatccaccaattgaatcataatttaatcttactgaatcaaaattttcttctacttggtcccataatctaaaacataactgtggttcttgaaagattgcttcgtagcaaactaatatttcaactatgattttcttgtcacttgaatctttgccactatgcttctgtgttgtaaatgtatgagatgaatttgtatctatttcatttgatatgatgaactgacatttcaagacttgactcaaaccctcatgtttattcttattccccttatcaataaattccacacatttacaattagatatgttttgtagattacctgatttgtatatatcaaacacctgtgacttaaaatcttcttcaccaatcatctttcgttttaccgatttcttgtcaaagtatataaggaaattaatatatatttaactaaacaggtaggcattataaaatacataataaataaatgaataaataattaactaagacttagaaacattaactacaagcaccaacaaatgaataaataaaataaactagaatagaataaataaatcaaaataataataataataatatgataataaaaattaaggaaaaaaaaaaaaagaaaagaaaaaaatatcacaaataaaacccaaacgaaataagcagtttttaaacagaataaaacccaaataattaagagattttatgattttataccagacccatttactcaagtgaaggccatttgtttcttaatttcagcaatagcttggcctggattcaaaccctttggacaagttttggtacagttcatgatagtatgacatctgtataaagacattgagttttgtaacatctttcttctctctttgacggcttgatctctggaatcgattaaccaacggtaggcttgtagtaaaacggagggacctaaatattcttcttggttccaccagtaagatggacatgcagtggaacaacatgcacaaagaatacactcgtacaaaccatctaacttttttcggtcctcgatgctttgtaagacttccctaccatcttccgggaaagattttctttgtaagaaaggtttaatagatttatattgttgatagaaattggttaaatctgggactagatccttgacaatatacatatgtggtagtgggtatatcttcaagttctttgattcattttggtcgatcttacaaagacaggccaaagtgtttctaccaccaatattcatggcacaggaaccacagataccttctctacaagatcttctaaaagttaaagtggggtcttgctcatctttaatcttaagcaaagcatccaaaaccatgggaccacattcatttaaatcgacttggtaatcttgcaatcttggcttttcttgtggtttgtcaggattccacctgtaaatcttaaaggtctttaatcttggggctgctgaagttgctttagtagctgccgtagctaaatttcttttagttaaaatgtttctcatagagatcatgactattatcttaaataataataataatagttaaacaaaaataaaagagagagagagatgaaatatattgtataattagttatcttcttataacaggatgatgaggcaaaagaaataatatcaaataaatataataacgaaagtagatgtatattttatttatgtatgtatttctctatctatttatcttattttttgcttttgcgttactcttttatgcagttagagatgtttgtgttagatcatacacttatgattaaaaagaagaaggggtttaaagagaaagacaacttgactaaatatatattatttttttttctaaaattccttatacttacttcttccttacaaaaaacaaaaaaaaaaaaagaagttatatttgaattaagttgtaaacaattaagctgttatatatatgtatgtatgtatatacacatgtacgtatgacactaggaaaaaggaaaaaagatgcgattcacaagacacagaaacgtaaaagcaagagcaagtagttagcaatgcacgattaacgactactctaaataacaataaaacaggaataaataaatgaataatttatatatatatatacatacaggtaaatagatagatacactcacaaaacagaagggaagagacttaaactgcccctcctgcctcactcctcccaattcttccggtggtaattagcgtgtatatataacctaggatataagatgtgtcaacctgtataatctgggctgcagtctgtactacgtatagaaaagataaagataaaagataaaagatttgcgatctttgcgcctctcttgttgtttacatcttggactttctctttctcttttcctctttgcttctcttctccctttggctcttttttttttttttttttttttttttttcagttgctgtaattaggggagaacgctgattgaaaaaacaacaattgccggaggagaaatttcctttgtttttgtttttagccaatgaaaatctcggagttgtagaaactatgtctttctgtgtttctttctgtgtttctttctgttttttttttttgtatttttatatttttttttccaattcgtttttccattggaccgaaagagcttcacaggttctttcgtctcttccttcatgttgttgatatcaagcttatgttctttttttcacttaggggaaaatcttattatggtgaggaacaatatgctgtcttgattaggatgtaaatataatatacatatatatgtttacatacatatacatatgtatatccattacttacatgcttatttttgctcttatcgttactatttgcaccattacagtgtggcttcacaatacttgttatattctaaaacagcaatcttgatatgtctgtacaaatatttcttctctgcaggaatttcaattggtatgaaatattcactttgcatcttcagttttatacgtataccatccgattcgacagatattccttgaatagaattgtatgaagtaccccacatacattctaatggagctattctaacctcacagatccgttccatcgaaactataactgctaattctctgccgggtagtatcacatgtgctaagtaatggtcatttataaataatccaccattacacgtttttagccagaactggccttgtgattctcttaagttataactatttatcacttgttcatataggtcaatatgtcttggtaaacgtgctctcgacgctgacattcctcctgctaatgtagatgtactttttttcacaccttgactcaagttacttgttagatcaaggatcccaatggctgttttcgttggtaatccgaccaacccctttccaatccccttaaaaaaccctgtggtaccttccctttgacctccacgtaatggatccatcgctaatcctgcaataccactacctacagtagatagaaatgatgtagcagaattaccaagaacgttcccaccattattcacgatcctcttttgtaatcttctagcttcctgaaattctctgtcttgtgtcaccgataatccctttgccatggatccagtaaacttagtcatactatcagatataccatatacagtcttttgtgcaaaactcaacccacctttggctatatgcaagccaagctcttgtggtctgtcattcaacatatacccttgatatggttcatagaataagtcccaaacacctgaacttatggtgttgaatagcccaactggattaccaaggaaatccgcagatcccaatatcatatgaatttgatatataaattgttgcccgtaatgggtctttattaaatcatataacatcgcaattggtacccttgagttgtttagtaataatgaattcaacttaattggtgcatcattcacattacctactgccatactcaatatatttaagaaatacattgaggatagggccgtcgtaaattctggaatctcaattgatccatctccctcctgttgcaatctttcacttctaacaaaggatatatgtaattgagtaggttgaatatggaaaagttcaaaatatatatcattcgcaaaactttttttattaaagtaggcatcaacactttgtcatctctggtctcagcaatcttaccatgattattatgatttcctgctgcacttggaaatttaataaaatctagtactgcatatataaattcttcatctaattgaatagaaaattcttgtaataaaaatgtagcatgtttaaaatatggaataccaaatgaatcatccttgaccttagatactgatcctgaaattactggatgtatctccagttccttattatccttcggtatattagcagggtatagaacgtttgtaaaattggtaccaaatagttgattatcgatctgtaaccattttaatttccatgacaaagttctgtaaagttctgaatcattatatcttaattcaattccattaatattaacatacattaattcttgcaaatgagaattaactagtgaaattccaagtcctttcacattaacaatgattttagtgaataataattcatcctcctcttttgtctcaaaaatatcgttaggtgtaaggagtgaagttgaggattgtgttaaaatatctgtagatgtagaccttctctctcttaatttatataatgatacttttggatcataatttgtaatcagtaaagcttgtgtaggaccatctgccacaacacttaaatcgacgataataggtctgccgttggatgtctcccctggaattctcattggtttcaaattaccaatctctgccaactgtacttcacgtctacgaccctttgaattcaaaattaactttttttgtttagcagttggataatcccatgcatatggcataacgctacgtggcggtattctgtaataaataggtttgtattcaatttctggtgactcatatggatcttcctcctgtgatttgttatattgttcatcaataattctgaaatctctttgataaaatataaattcattgtcactgaaatttcttatagaataaggccataaattcattccattcttaatactaatgaataaagttgcatcttgtaaagttatttctaattttagtaggatgtgggttcctgcttctcttaacaaacgaacatatgtcaaaccaacatccttaatataaaatggtgctgaccattctgaagtatttcctaaagccttgatcattaactgcttattagaattgttttgcaagttgtacaatggaatagttttatttggttctatatcaattacatctggagatcctaattcagatacatttatagtgaaatttaaatcatttttaatcatatatcttggtgtaatgtaaatcattttgcttaggtggtatggaccatccccctctgtgatgctaacacctaaattgcattcttgtgacttatttgtaacatttaaagtcacatcaaagacctgacctattgcatctaaagataaacgaacgcttttttcagtgtgcatgaatttaattctcactctattcttgttagaattgtccataaatgaaaacattaatggctgactgtagatactgtcctcttctaacaaaactctactttgtacaacattaaaattttcttcttctatgtataaatctttaccagttccattcaaaataatatatggagagtaaattttcaaggttctggacctcccatcttcttgtttatgatattttactcttaagtttaatctttggccactttcaaaagttaatggaagaatttcttcaggttctagtgatgtcctggtcggtgtattcacaattgatggctttgacattggattaccatctacatgtggtcgaactgataaaagtaaaaattcatcaagagacacactatggattaataccgtttccccttttttcaagaaactttctttttttgagtcttcacgtctgctgaaaacacggtaattcatatcaaaaggcaataaattttcgattaccaatggaggtgatatgataattttcatatgaggatatatacgagctaatggttcctttttatcatataaagcttttaattcaaagtaaaatttttcctcatattctgcaattccatgacattctactgaacatggtgcttcaagtaatttctcccataaaataggcttggatgaccaatcaaattctccatgagttttaggttttacaaataggttgcaatcataaacatattccaatggaactgatttgcattcctgttccttgattactaaaaagacaggattatttattttttcagactctactttaatttctattgttgaacttgtactattttcgatggctagtgttgatctgaaattaatttccttaattccctcaacagtactttttaagtcacaaataattcttctatgaataccatttttagcaggtttcaaaacatgcagtacctccccttcatatgtagcatctattgtcatgattgtattgtaaatatctccttttacagaagcttgaagaacatttttcttattatcagtatctaattgttctctgatgctttgccagtcttcaaattcccaaggaagtacctcacccatttttaagagagttaatctatctttttctttgtctgagtcaccctttacccatacttctatatccacacctgtatcattgataagtctatatggctttttgaagcctctaggctttaatttgatttcacctgataaagatgctggtatattcaacaaagttgtaatcgaccgtgaggacaatgtaatctctgtatttgcctctgttgttacatcaattaataaagtagaattagatttagcctgaacatttttggccaggtgaaaagcgacatttgttttttctataagaggctcccaacttgatcgagagtaattaaatatgttaacagatgaggtaactgttgtgatggcatcaaattcagtagaccagtctttagcattaacaacaaatggatgaatacgggcatctaatattggaatttcgtgaatatcacccaacaaaatcactctaaaaccaccaaagtgagcagaaaaaatttcatttcttaactgaatagataaagaagtttctattgacgataaatcagatggtgtaactgggtcatcaccagtgagtgatggaacatacttgacaagttgcttttcaaattctttggaaaatattgcggttttctcgtctgatttatttgaaaatggagcaagctgttttgaatatgtattcaacaaagatacagctctgtcaaaaattaacattgctaatcttatatcacgtagagaaatgcgcattctaattggttccacagctacctgaacttgggttgctaaatttgatttactagtatttcttttatcaacagtgatagaagaagaaaaatcgtccaataatcttattttttgttcttcaatcatattcattttggttaaaaatatacctatattatttattgttaaagttgaaatactttgttcagtgagcaaaatctggccaacactaaaaacaatggcttctgtatttaaatcagaaggatctaataataataaaatagcagaatccaaaattttgagagaataatgaaataaattctttggagtatcatttagttcttcagtggtggcaacatgctctagtagaagttctttacttggttgtaatgtggatttagggacagataaaatatcaaaaaacttcttgagcgctattaagtgatccattgcaagaatgaaacgtgggctatttacagagactgataaatttgtcaatagtccatcatttatccattttctagttattgttgctataaattgattttcttcaccatctaattttggaatcagttccttgaatttgttatcttttacgtttcttgtgtcttcaattctaaaggctgaaatgtgcgctttaccgacaaatgtttggttgcgatttgttgaatatgatattttcatatcttgcaatattacctttgttatgctgcatgctgatacctccagtacattttttgtatcatcatacaaagttaaagatacaagaggtccttcccaatttacactgataacttttccagactcttcagtggagacatttgaattcacagcgggcatattatcaatatataaagagctgtcattagaaaagccagtatttgctgtaatatcgatttctggtgttaaggctctttcatatatatttggaatattaaaagtttgttcaatagtttcatatatggaatacaagtatttcatttgtaattcagtaacatttaaatttagctcttctagacaaccaaaaatttcaaaatccttttcgaaacctgtagcttcaggattgtggttaatattaaaagtcaaattcattttatctgccaaataaagtttttgttttcttccatctccaacctgaagaagagatgatatttgaccatctctcaatcctgcattaatgtgattaatagtggtacctgacttattgaggatgaaattattattaataaaaaattcaccaagataaaacttgatgatatttggtattgttggtttattttcatttacgtaaaaaaactgtataactggggaccttataatggcacttacttttaaattttttactgtatccaaggatggtgcttgttcatatgctgcttgacgtatccggtcaaagtatgttttcattttttgaaacttatagaaaaatataataattttattaattgtagcactattaaagttgataaatgcctctccagtttcgcattcaaataaagaatcgaaattgttattatttgtttcaggatcatatgtctcatatgaaaacttgagaagttgtttaccattcatagttataatcttagaaggaacatagctatttgtactagatatattgtcatgtagttccaaaccatcgattgtagaactcattctcatattggttggaagtaaaagcattttgaaagtaccagacaaaatatcaaatgttgcaattttatcattattgtcattaaggtaaataagaattccatcaatagcaactttcatatttattttttggggtgaatcatctttatcttcactgttatgtttcaaaatatcagctggaattccttcttgaggattgttaaatgtagaaacaacataatttaacaaagtaagtattgatttaggtgtcaaagttatcattaacttttttaaacttatatcaatatcttgatcaaatacctcaatatatgatttttcatgcattacaatgcgttgtgacctaatatagactaaattaaacaaatttttgtcctcactttgagcgacagaatttgatgatattagatacttgaattctttaacattaatattttcaattaaatcttccaaatgtaaatcatgaacaccgacttgaagttttatatcttttaatgttttagaaagattaaaattaacattgtcaccaattaaattaactaatttgtcacatctcattgaagtagtatcaatacattttaaaacagagaacgtaatagaatctatcttcaaagatatttctatttgcttttgttcaatttgtaagtttgtcattttgttaatagtatccaaagtgtcagaaagacgtttttgatcaagtttatagaaatcttcatcatctatgttttgataagaagttattatatcttcagaaatattactatcagtctgtggaattaaattttgtaacaagtccatcattattttgtattggagatcattaaatgatatatttagttgaggtagatgaccatatatcctagatttaggtaatttataagctttcgaaaggattaacaaatcaaatgtaacttccagtttcatcttatccagtatacagaaatcattatcacttacagaatttgaaagactagctaaagtggactggattgtcggacctaccagaaatttagtatcctgtgatattattagaaatctatcaaacattaatctattaatatcttcactatcaattttgtcatattcatctactgatagctttttaagttcttctagcttgttcttagaaataacgtcactattaacagagatgtgaccagtatctatgattgtacatggagaatcccaattctttggactagtaggaataatgattaatggtgcttctaagtctaagtatagatctaaagttttatgttcttctaaaagtgattcaatacccattctagtatgggttgaccaaccttcgacagtttcttcagtcacatttataattttatttattgtttctagatgctgcttttgtggttgaaaaaatttcaatatactagtaagaaaataaacgttatagtatattgttgtgcccaaaagttttaaggaaactctggaatctacatccctatctaaaggattattttcaaagaaaaaatctactaatggttcttgagtaacttctaaatcttttgacacatttattttaggacttacaatatttttaaaaaggcagttttcggatccatcttcgatcttaaattcatccaacttaaaattaagcaaaaatgagtctggccttttgtttatatttaacagacagtcattgaattttatttcagcaattttataatcaccactatttctgttctgcaagataaaggaaccattccttaaaaaaccgcctaaaacccattctgtccaatgtctcggtatgttattcttcaacataatgtttgaactagacttaatttcattttcgttgtattcaataatagcataaagttcttgtttttgctcgtcagtgagtgttgtattattagaagtcttatttgtactccaccaggatgatagccaactggaattctttcctgtttctgtagtttcagtatgatctgcatctctaacttcctgtgattgctctctcgatgctattttttctttagcatgttctgtttgagcaatcattctaaataatgtgatcatttcaaaaggcaaatctttctgtaattcattaaattctttttcgtcgtcttctgaaggcaatggaagttcggtagatttcgtatttaatttttgtttccataaagcaatataacgtctcctttgttcacatcttaatttaatttgattccatgaccattttttattcttttcatgaatttcataaagagtacattgcccaaagtatttaaaccagcttttaggatcttcctgaattgtcattttaggtctattcaccttgtatttagccgactgtctctgaatatgagtattcgatataaatgtcaaaagatcaagatattgataatcgttcaatttaataccaaaattatcacaacttaactcaagattaatatgaggtaatttttctgttgtgccagatttattaataactaatttccctaatgtattaaccggtgataaaatatattctttgctatttttaagttccatatcctttttcaatgtttgaataaaggcatcccaatctgattgttgtgaatccaatagtaaacttttacaattatctgaattccaatatatagcgagttcttccagtttcattaatttatgtgtcaaattacctgaaatttcaataaaacttggtatccatttatcatttgtagacacagcagacaattcttttaattgaaagccgatacttgaattataattacataatttaccctcaacatcttcaaatcgaatatgaatatttttaattacaatttgtaaattatctatcactttagtgattaaagattgtaagaatgattcattggacgaattgggtatctgtgttacatcatcattattggcatagtttttggaaacgacttttttatttgtattttcgctattgtgtaattcccattcaagtagccttttcaatttgagtttcagttgcctctcattcaagtctgtgaattcataaaatttatcatttggtacaactatcataaaacaatcttcaattacgatcttcacaggtttatttttcaaactagaccatggaacattcattgacaattgtcccaatacacccatttccacattaattggtaaatctaatgcatctaaacaatcttttttcaattctaaattttttagttttacatcacctgaccatattcctaaattcagctgtgttggattaaaattttcaatatatgaacctaaaagacgattcaataaggatgcagctaatgattccagcattattttaataaattactacactgtaatggtttagtttagtttaattgactttcagttgatttggtttggtttgttttcttctgcatttatttaaaatgttttacaattaaaagattttaaccgctgtatatatattatgttgtgttgtggttcttcataatttagtcgccctttataaaataggaatcgttgtaaattgctttttgtcaaaaaaaaaataaataaacaaataaatagatatatataaaaaaaaggcagaaaatgaaaatggcatgtaagatttatatataaacgagtaaacgcatccaaacgaaacggatatatatacatatgtgtgtatgtaagaagctattgatggtatattcttttaatactttataatcattattcaaagatatatttatgtacgctattagaaccgtaaagaagacagcccacttgttcattagaatataataaattgaatttgtatgtatcattcgtatcgcataaatcattaaatttcaactcctttataataatccactgatttgaagtcttttcatatttataaaatttcacaatcttggttatattatcgaatgctgtcataagtttacccgatggaaggacatcgcattctatgtgattaccattatcactattatttttattattatttgcattgatgtttaatgaaaaatacggcattggtgattttcttaggtcaaatgtgattataccagtattagtaaatacaaacaaccaataaccattcgaagaaaacttgacagatttaatggtttcaaattgatcatcattaaggggtacttgaataggaggggtcgaggtatcacttatggtcaataagaaaatctcttttgtattaaaaacagccattagaagggcatccttatgcaatgaggatccaatgaattcagccatttgtcttgattcaatgcgctgtttaacaagtagatatggctggttattattaatcaaataaatatttcccgaagaacacgccactaagtaattaaaacctaattttttttggctagaagaatcgtttggttgctcatcatatactccgtcagtgtaaaacattcctataatcgattcattttccaatttacatgaatatttagaatgatcttgtatgttataaagtgtacatatattggtttcatccttttcaatgaaaagtattgaatcttgatctgggacaaagtatagataagatgttgtaaagttagaaaaattgataaatttatcctcttttaaagatataatatatagaccagcattatcatcggttgaaatcaatgtgctataattattaaatgtgtcagttacacttttcagaggatatgtggatatgggtataagaccaggatatttagctgatattgatttgataagtttaatggattcataagaaccaacattattaataatatttttttgtagaagagcaatctttttgataattggttttgttgttatcatatactgctttgatctttcaattaaatcatttacatctaattttaatccaacattgatattgttactattagggttattatcatcagtggtagtaatgctattattattattattattattaacctttggtacatgcccaccactcatgtatttagcagcaattaattttgcagcatctcgttcatatagagcttgtgacaaatttttagataagatatctaatttttgtcttaataagaaattttcttgcattattgcatcccattcattttgtaaagtagataaaagatttgggatagaataatttgtgtttaaagttgatgaatttaatacgttagtattagaattcgatgcagttaaatcgatctctataatgtcagtgggtgtcattgaaactttagttattggatcaacaccattttcatttacgtattgaactaataaggatttttcaaataaacatttacttttatttgatacaactggatgtagtggtggtttaccactaattgcacaaaacattggaaaattctttctttctttttttttttctttgtatattatccttacttctcgccgctagcttaacagtatgtaataatgtaagtatatatatttaataatctatttatgaaagtactatttgttgtctttataaatcttttaatttttctagcttaatatttttataaaatatatatatgcatttccccctgtttaaatatccttcacctcataaatatttggaaataatcgtgactaaaaataaatgcctacacgtgaacattaaaatagattaaagattattgaatataaaagtgttgaatagataaacttaatgatacaagatatactgtctagtcaaatgttagcattctatctctctatattctgaaaattatgatttcattactacttgaatttttgttttaatcttcaatttgaaaaaaaaaaaaaaaaaaaaaaaaaaactaaataacaaaaaaataattaagaaactatggcaacgcggggtgtgtgggtgtacaatagcgtaagacatgaaaaactcaaaatataaaaaagaaacattttcaacatctgtacacccaaatctcatgtgaagtttttttttaaagagaacatgaagtttgagcaaaaaaacttttcagtatctttattattagtggcatctcatcgcttatcatcaattttcttgaagatagatatgattaaaaatttgttacatacatatatatacatatttatatagatgtatgtatatattaatgcacttttgaaccttttattttcttttcactaactcaaaaatagttgtaatatatttaaattgcaatactaattgcactaatataaattgaagaatggctagagggaaaacaaggaaaggtggtggttcgttagtaaattctttagaaaataaaattttatctttattagaaagattattagaagaaaagactacacaattaaataatagcaaggttaggaataaagattcttcttctcagaatgataatggtaccggtaatactagtatagataatgatgaagaaggtgattatgaggaggatgatttattgtttttcgctaaagatttaaaatatgaagagatttattcatatattttaactaaagatatgtctatgcaaagaatgaaaaaacacttgatccaaaaatctattgaaaaagtttggaatgaactgataaccactgaagatgaagaattcaaagattatccacaatacaatcctaagaatgatagtgacaatactgataattttatcactgagagtgcaaatggaaaatccaaaaatgatactaataatatgaataaagatattatcgagctctggaatgtgaagaaaaggcctactgtaagcacaaacacaaatacaacaaagaaaattaaaaaacaaaagctcaaggatagatccccacctgatgcagatttgaaatcattaggtggtatggatgatgtagtagcacaattaatggagttggtagggttacctatcttacatcctgaaatatttttgacaacaggtattgaaccaccaagaggtgtgttattgcatggtcctcctggttgtggtaaaacatctatcgctaatgctttagctggagaattaaaagttccttttatatcagtatcagctccatcggtagttagtggaatgtcgggtgaaagtgaaaaaaagattagagatctttttcaagaggctaagcagatagcaccatgtttaatatttttcgatgaaattgatgcaattactccaaagagagacggtggagcacagagagaaatggaaaaaagaattgttgcacaacttttaacctctctagatgagttaacccttgaaaataccaatggtaaaccggttatcgttctgggtgccaccaataggcctgattctttagatcccgctttaagacgtgcaggaagattcgatcgtgaaatatgtttgaatgtaccaaatgaaatatctagactacatatcttaaaaaaactttcatcctccttaaagattgatggtcaaatagattttaacaagttggctaaattaactccaggttttgttggtgcagatttgaaagccttaaccactgctgctggtacatgtgctataaagcgtatctttaaaaactattctttatcgaaaaattctcaactaaatgatgaggacatggatatagacaccaattctgaaaaaaatactgcaaatttgatagatccgttacctttatcaatcataactgattttatcaacactttcccagaaccattaaatgatgaacaattaaaacaattatcaattacgtacgaagacttcctaaaagcattaccaacaattcaaccaactgctaaaagagaaggtttcgccacagttccggatgtgacttggaataatgttggtgccctatcaaacattagggttgaattgaatatggctattgttcaacctatcaagagacctgaattatacgagaaagtgggtattaatgcaccagctggtgttcttctgtggggtccaccaggttgtggtaagacacttcttgcaaaagcagtggctaatgaatctagagcaaattttatatccattaaaggtcccgagttattaaacaaatacgtgggtgaatcagaacgtgcaattagacaagtctttacaagagcaagagcttcagtcccatgtattatattctttgatgaattagatgctttagttcctagaagagatacgtctatgtctgaatcgtcatctcgtgttgttaacacattattgaccgaattagatgggttaaatgatagaagaggtatttttgtagtgggtgcaacaaatagacctgacatgattgatccagccatgctaagaccggggagattagataaaacgttatttatagaattacctaatagaaatgagaaatttgatatattaaagactataatcaagtctaatggtacaccagttgcggaagatgtgaatttagaaaatattattgatgatgaaagagtgcggaatttctctggtgctgatttggcatcattagtaagagaaagttcggtattggcattgaaaagacgtttctttaagaacaacgaaatacaatcagttggtgaaaatgatttagataaagaatttgaagatttaagtgttggttttgatgatcatcaaattgttgttggagttgaagatttccatcatgcgttacaaaaaatcaagccatcagtaagtgataaagataggataaaatatgatagattaaacaagaaaatgggatggaatgatgatgtgcaattggttacggatactactgacaatagtactaaataatagattgtgttaaaattctataagttattgtattattatatatgggttaacccattttattcttttattcttctacaattatatgtatttgccattcttaaatgattgcaaagattttatttcatgtaatgacctcttctatgaatattctttctaattttccatacgtgctcatgcttctttgccctttcagttgatatatacggtatagttcgtgtatcggcactaaaacattcagtcatatatttctttgatgggtatagttcacatatgggtgtttctgtcttcccccgagcaataatccattgagaatcatctgtgtcgtttttaagagtatctaagaaaatctctggaatatacatattaataactttttgttcttcatcgatagaatgaatcaaacctaatgtaacatattgaaaattcttcgaatttctcttaccttttattatgggatatattccgcgtaattccgtgatattacttaattttgtgtccatatcatcgttgttgatatatttatgtataccaacaatacaagtctcaagacaattcttaatatcatccttatgtaactgttggaattcttccataaaatatattccacttatacaactgtctttatctattgagatctgcaaaggtgcatgtgaaagtaatggtttaaaatcgaagtcaaaaaactcagaatctttttggaattgtttatggaacaacaagagcattctaaatattcttagttgagatgattgaaatttcagttggttataagaatcagaattcgttgatacactttggtgaggtaataatcttataatagttgaaaagtaattctctctcaaattactattaaaactttctgggataaaaatttcttcaaagttggatttactggtatgttctagtatcaaaagatgtgtaggtttatattttttaatgacatgattaataatgtgtataccaaaccctttgatccatcctggcaaattcaataaagaagtccctgtaaaatattgttcttcaaaaaaattaaaaaggttatctattaatgaaagatatagctcaggattctcttgaggagagtttactccaacaaaatgttgcctcaaaggtgtatatccacattgcccaaaagtggttcctaatgttgtaatgtttttatgtttcttgatttgacctaaagagacgcattctgggtttgaatactccggttgacctggatctaaatccatataccaaactaatctatcattatctataaagtctggtcctttattggattctgtgtttaggattttttcagttaatagtctcaaaaatgttgattttccagaatttttacccccaataatcattatccttgtatctagatgagaattaatatgttcgaagtataatctttctaaaacatttctccattgtgaagaaatagttaatggtgtaaatatatcttggttaatatttagtattgtgaaggtcttactcaattttaaaaattcactggtgctgcagctattagtattatatatcgattgtgttttaggtttccaaaggaaattcaaatctgaattcagtttattgacgtcagttataccgttaaattttttattattcgttattttaataatacaaataaaactatcagtgtttaataagggtatgttatttaatgatttcttatgaaactcgggttcattccaacctgcataaaaagatgaaattatggcaggtacagagcatgataaaggatgccatatgtttaatgtctgcttatttgatgcattgtaatgaatattgttatagactataccaccttttaatatttgtagatcaaatataccagatatgaaaagttgttgcttttctttgagaccaagataaaaagattctggatcattagaaatattaaaaatgttaccatttataataggaataaaaatatgggattcaaaatcagcagtatttgactttgaatctttactattttcatcagattcgtaatcttcaatgtctacctttacagtagattctcttgataaaaatgttgaggaactagtagaactcgcgtcagaatcatcattttcagaatcagattttatagattcatatttaggtaggtccattgtttttactactcacttggtttataagtcttttctgataattgattaagacagatattaaagcgatcttttctattatagattgattgttactacatctcatcatttgtcaaagcgtcctaagagaattttaacctaactcttttataaacctccatcgataaaaatcaatttttttcgtttacgtagataagattaaaaaaaaaaaaaaaagtaagtcaccaagcaaaatggcagattctattttaatgatacagagatgcttcaagatatgaggtagcctattatgtcgaaaacaatcgaaactgcccgggctatcattggaagtgacatccaattattaaaatataataaaaaattcataattccaaaatcgatctgcgagctcaatgagagtaataattacgatgttgaagagaaaagtttcttaaggatgacatatcgaagatttatgcggttgagacctcttatttcacagagggcaatggtacgagatatttacgtcaattatatacgatgtaaatatagatatgaatcattatacttgaaaaaccagttggtgtttagtgaagctgcaggagcaacatcatcgttggatataatgcacgataggaacgaaactgataaatgtaacttaagactaaagatatacacgtctttacagtttatattacaggcattgagccttgaggaatctagtgtaagtgcacaagaaaatcatacaaaagatattcttttagctaagcagatattcaaaaatatactgacagtggaatatgagaagttgaaggcagattcagaaaggaagtggcaatatagaaagaatggtaatctaattaattcggatattattgattataatatcgaatgtaaccatttaagaaaattcacaatactaagtagagaaaaggagaataagtatgcagcaataaaggcctttgatgaatgtcttacatatttaaataagactttaaatactctcctgtaaataattaatgttttattttttttttgtatataggaactatatatagaacagaaacaaatgatattcgcagtttaatttgtctataacagaatttcatggataaataaccgaaaagttctttgcacaattcattttaattttttttttgtctgctaatagataaatagtttaatcgtaaagggttgattttcctttttcaatatgtagtaaatgtttatttaattattttgtttattctttgaattaggatatttgtttctcacatacaactacgatattgaatttagcttttaaaacttctaaataatgtaggactattgcatattcttttggtgattgatgtattaattgtaatgagtttaaatcattagaaactcttaaaacacaatgacatagagattctaattgtaagataacattgtcgtggaaccattcatttttttgctttatgaatgttttgaagttatctgacatttcaaatatggtttctttaccacatacgatttctttaaatttaatcattgcattaaatgagtttttcttattatttatattattgttgttgttattactagtgctagcgctgttgtcatgatcctgttcgtttgaaaatgttgaaacatcattttgattattgttaaaactacttccaatagttaatgtgaaattttcattaacataattcttcatttcattcggagctggaaaattaatagcgacattataagtcttttcaatctgtggaatttttgtatggtttttttttaatgtgataaaatggtacatagcaaaggataattgaaaagactgtaaatcttgattaatcttaaatttattaactaaattcaatatttcttccttggccagtttaatgtttgccatattttttcttgggcatcttattattacgtttgggtatctaatcaaggaccagttcaattgtggtagattgaaactgtttgaaaattggatgaaaacattgtattttctcattatagtctgaataatagatccacctgaaccaataattggtctatggaatacctcaccaatatggaaagattcctcaataggtaattcatcaattatcaattttagactttgtttatattctaatttttgtgggccattaatgagttccaaattcatcaaaatatcatttttatcgttacttctttcatttagtagtctcactatacaattaggttgttgatccataattttaattagcttaccattttttttgccagatatgaattgttcaaaatcgtaatgaatttgaaatatcgtcttgaattgttttaagttttcagcaaatggtagggttaacaattgatccataatattcaggaatctattatagtcgatgattaaagtgaatgaatcgatgggattggatatgagattatctaaaggtgttactaaaataaattcttcaccttcgaggatgctgaaaagactacttaaatctaagataattgaatcaaagtaaaaagtaatttcaataagattttgtaaaattgataaggataagtcctttagacacgattggattgactctgatgaagatccatgaaccaataaagaacatgaagatggtgtgttgttgttgttactattgttatttaactcagtaaaatttatacatgtttgatgtttaatagataatgaattcaaatgaaggaatctaaattttctcaaaaagtaaatcttacctaatggaatagtattaataccaaatggagaagacatggtattttgaatagggcataaatctgataaaaatttattaaatattgtggtgacatattctacagtggcttcggtggttaaattatcatagccaccgatatatagatcggaatgagttaagtctgataaagttggtacatgtaaagatacattgtggatggtcttaaaatagtcaacattaatagaatgtggacctgatatcatggggatagaataagcgtttaaaattggaatcctttgagataaagtgtaattagagataacgaactcgataacattttttaaaaaaattaatacgttgttttgtccaacgatatataaacaaggagaattattatctgttgtatcatttaatatatttaaaaagtcatattttgttatcattatatcgactttatagtcatgactaatctgattgaatatatttttaagattaccgaaacattcgtcttccaataaatattttgatacatggaaaccgtgaatatcgaaggatgagatccgcgaataatctattttattgttagaaatagtattgctctctttgttattgtgatatatgcgaattattaatctcaagtcaactaagtattcatttatacgattaaaaataattggataaaaactggtattgtcattagtattggcattggtgttactacttatagtttctaaattttcaattgatatatcagtacttatatttagtaattgtttcagaaatttaatacaattgcaaccgttatcatttttgtaaagaattgtatcatctattgaggatggaatagtgatccatttatagttgaaagttgtccacattcaaaaataatagaaatgaaaatgaaaaaatgaaatgaaagaaagtgtaatcaaatattaatttgatgtatatgtatatatatatgtgtgtgaatatatatatatatatatatatatatttggaggggggaagagaagaaaaaaagagtattcaaatgctagatagctgtattattctagtatagcccaaactagaagagtgattgagtctctaataacacggagaagggtagaataagtatagaacaatctgttttgatatatggtatcacttagtaatatagtacaaaacaagtatgttaattagttctagcaagaattttgatctttgatttacaataaaagtaaagaaaagggaaaaaacacaaattaaaataggaaaaaaaaaagctgtaaacacaaaatatagcaaaccctaatcttcatgacaaacaagccctaataattccagtaaatttcctgtttgggaagtctggcatcagatgcacagtaaaaattctgcacctctttttgtttctttttccttttctttttattgcacccaagaaattgaaataatgttgcacactcttttttttttttgttatttttttcttttgttttttattttcttggttcttcaatataaaaaaatcaggactaaaaatatcgggtgagaaataatattagatgtttttccaatagcaataattttgtagtgttagggttttgttaaaaaatatcttggaactattcgatttatgtatgtagattttctgtacaaaccaagttatacgtttatgaaaatttcatttagagtaccaccagatttatacccaacaacgacatatcttttgcctcgcccctttccccacacacaaagcccagtgatactgaacatttagtaggtgagttaatacattatgctgttcatatatttcttgtaaaatgatcgttgatgatcaagttattattaatctatctttgtatatttaacactgttttatgcaactttttatatatattataccattattattttttgttttggtttgttttgtttaaactaatatcactaaggtgtaatctccaaaaaaaaaaaacaaatgcgagacacataatgcgacacagtagggctatagtaaaatttttgaaaaaaaaaaagaaaataaatatttcctttctttagaagcaagtttgttctatttttttttttaccatacctttttggtagagaaaagaacaaccgtttgatttttgggtgtaaattttacaaaaacttcacagtgcagggaacaatggtcacaaacgttaagttcctttgtgtgaaacccaaacatcgaacccgtaaatcttacctttcatgccaaactgcacacattttccttccattttttttatatacgtatatatttttttgcttcttttgtttcttcttctcacggcggtgtgacttgggtgtttttgatgtttgtgcttcgaaaaaataataatactaataataatagtaatagtaaatttaaattaaaattaaaaaaaaaaaaggtgaatcataatatcattcaattaaattaattaaatcagctaattgattttctaaacaaattgaggagtttattactcgaggttatgtaattttttttttctattgttatttataagggctctatttctttcactttattgattgcggcaatgttatcaatactcaacttcttttattcttgaataatgaatacaataaacaacttgctttggatgcaatgagatgatgtttaataaagttgcaatattttgttggtcgtaaaagttgattaattagctaataaccaaataaatgaaattatataaatatatatatatatatgtgtgtgtgtagagaaggtatacatttcaccgaatggttttaaatatttcctctattttgtcaaattcaattaatatgtttccttgatacaaataaatcataccaagtaaataaaataactgcaacatccatatataacgatatattgtctcatagacatactcttttacaatgacttcagctaatgaagatattaaaaaaatagatatgatagatccatctctggataataatctaaataaaatacacactttatttcaaagggacacccactcatctttagggtctttcactagttcattaaaggatgaaaaaataggtctggtagatatcacacagaaaaatctgacccaaacagacgaatctaatattaactacaataaggatgaaaccaagtttagtaattccaatccaaatacaggtgctagaggtgtccgtgctgttcaattatacgccaagcattacaatcatcccatatatagaatcatgttattcttttctatctttttagtagcatatgcttatggtcttgacgggatggttcgttacacttaccaggccagtgctacttcttcatatgcacaacattcgcttttgtctaccgttaattgtattagatctgtcatagctgctgctggtcagatttggtttgcaagagcatccgatatcggtggtagattcccgttattgatcatcgcaatcattttctattcaatgggtacaatcatcgaatcacaagctgtcaatgtctccagatttgctgcaggtgcatgtttctatcaattaggttacacaggtattgtacttctattagaagtcatcgctgctgatttctcaaatttgaattatagactactggcttcttttatccctgctttaccctttattattaatacctggatcagtggggatgtcacttcagctgttggcacaagatggaagtgggggatcggtatgtgggctttcatcttacctttaagttgtatacctttaggttgttgccttttgcatatgaaatggttggcatatagaaatgaggatacaaggaaacaattacttgaaattaaagagcaacaaagcgaaaaaggttggagattacccaaatcattatcggatttttggaatgtgtatgtgatggaactcttcattgatcaactggattttattggtttattacttagttgtgtcacttttggttgtattttaattccattcaccttggcaggtggattgcaaacacaatggaagactgctcatattatcgttccagaagttattggttgggtggtcgcattgcctttatacttgatctgggagattaagtttgccaagaatcctttgacaccatgggatttaattaaagataggggtatcttatttgccttaattatcgccttttttatcaactttatctggtacatgcaaggtgattacatgtacactgttctagtcgttgctgttaatgaatctattaaatcagccacacgtattacatcattatactcatttgtctctgtcatcacgggtactattttaggtatcttcattattaaaattagaagaactaagccattcatcatctttggtgcagcaatgtggttcttatcattcggtttgttggtccatttccgtggtgatagttcttcacattcaggtattataggttccttatgtttattaggttttggtgccggattcttcacttacacaacacaggcctcgatccaagcatctgcaaagacccatgaaaagttagccatcattactgcattatatttggctacctacaacatcggttctgctcttggtggtgctatctctggtgctatttggacccaagttttaccaaaggagatctccagaaggttacagaatgagactttaagtgctgaagcatatggatctccattcacgttcatctatgaatatccatggggatcaccagagagaatgatggtcactcaagcttatagacatgtacaaaagattctttgtattgttggactatttttttgtgtccctttattgttctgcacttttatgctaagaaattataggttgattgatagtgttacattgagtgaaggcaataacgttgatagcaagattgaagaaaatatagttgaatcaaacaataaagagttttcagaagaaaatagtgaacccaatttgagagaaaaatttattcattggtttaaataaatttcattttcttgatgttacataaatatataaaactttaatagtaattctaataatgttaaaaaatgattatataccaattatattattacttttatattttgtactattttcgtaactggttttttggccctgcttgctaatgtatttttgtttgtgttaatgaatatttcatcttttaatatagtgtagatagataattttttctgttttgggatctgtaatagatccctcatattctttggatgttaattcgttgaaaacactcctgtttaggtcgtggtttaaagatttctttctattaatctttgttacattatcattgggactaacattttcttgatctattagagtttcagtcgttgtcttttttgtgaaatattgttcaagaactgcttctctatctgactgagattcttcataaaaaggaaatggaatattatctaaaactgaattattatcactactttcattagattggtccataggactaaaatagaccgatttattcctccttagtggactggacctttcatacccgtttaaactgttaaccaaattttttaatggtgaaccagaatttgaacgaataggagacgatgaacgtgacttatttgcatttatattcacattttgtactgaagttgacccagagagtattgaaatagaatcatttctaacattactcatgaatacagattttctccttgcatcttcgtcaattgctacacatcgtgtggaaaagttcaaaggtgacctttttatgaaattatatttgccagctattggtgacgagtttcttggatatacaggtttgaaaggacttttcttaggcgatccagtaggtgttctagcctcaagaatctgtgacattaatagaaaataattaaacctcaaaaactaaaaccgtgtttatattgaagtttatgtgatttttggttatggcggatcatattaaaaattcagaaccaatcacagacttttcactcaatctattataatcttcatctcctaaaaggcgatgttaatggcttcttttgacggcttcctgattaatcttgtttgtttaaattgtgtttagtcctaacaaataaggtttgttggaaatatttctcttttttcgttacttaccctaaaaaaacaacttggttttccaaaagaataatagtaacctaatttaacaatttcaataactgtaattagccctaactgtttcagtcctggaagatcttcgatctctatcagaatctgtgatactcaaagttgatatacttgctagtgtagaatactagattttatgtgaaagatatctaaatatgagagtagggcatatacaaggagataaatatactaatctttaggtaagattaatacttgtaatacaatttaccattgatattttatcgaaagaaaacattgtgcttttcaaaagaatggataaatcaaattggatgaatgttgttatgaaaactgctgtatctgggttggatatttccgagactggactagatgctaatatgatattgaatgctgttaatgaagaaaatgttggcaatcaaaatgaaacgctctccgtagatgaagaatataatctttggagatccaatgtgccattaatgtatgattttgttagtgaaacagaattggtgtggccatctttaactattcaatggttacctcatggtaaaggacctatttcaaggaatattcaacaaatgatcttagggactcatacatctggtgaagaacctaattatttgaaaattgctgccatcactttacctgatgaagttgtagatagtgatgaagatgacactgatggtatatcaattgatagaaatgatcaagtatatgaaaatgataatagcaaggacaaggaagattatgttcaatctaatattagaattatgcagaaatttcagcatgaggaagaagttaatagagcacggtacatgccgcagaatcctaatatcattgctaccattaatggtttgggtttagtatcaatttttgatagagattcagatcaatgtaaagctattaaaactctaaaatatcacaaagataacgggtatggattaagtttcaacccaaattgggagggttacttactgagtgggtcagatgatcacacaatcgcactatgggatttaaataaggatgctaaacctgtacatatttggggggaggggatccataaagatattgttaatgattgtaaatggaatgaatttaataaaaatatctttggatctgtttcggaagatttgactttaaaaattcatgatctaagaagtaatgataggcataattttgattctagtatcagttttagttctgagtgtgtctttaatacaatagccttctcaaaacattctgaatatttatttggtgctgctggaacagattcttatgtgcatttatttgatatgagaaagatccaagaacctttacattctatgagtgggcatcaggatgccgttacaaacttagaattttttgaacataaggatggtatattaatgtccagtggtagtgatagaagagcaataatttgggatataaatgagattggtaaagaacaagtgttcgatgatgcagaagatgcttcacccgaagtagtaatgatacatggtggacataaaagtcctgttaatgatatgtcgatcaattcaaatatcccttggttgatggctacctgtgaggaaaataatatagtacaagtttggaaaggttcaaaaaggttgcctacaataggtggtttaccaaaattgaatgaaacattatatcgagaattgcttgacaactgaactttcacaaaggtaggaatttataaatttatcaatttatatatatatttattattttttagatagtatacatatatgcatttgtaaatatatatgttcttttgaactattcttcctatgttgtaaaagaaacaattccggacttttaatcggccttgaagttaatggaaagaattaagaagtttgttcggaattttgtctctttgaagaaagccaattaaagaagtcaccgaataaagatgaagtaaatttccccttcttaagccattgttttgttgtctccgtatataaatcaattatatcgttaaatgcatcgacttgtttattttcttcgacattttccactaatattttgctcatataaatagaggaacttgaacataaagaataaaataagttgttgaactgaccaggtttagtagtcaagatataatcgttgtgaatggtttttaataaagttaatatttttgcacaatcgatgactgatgtgattttgaacttgaataatctggtttttaataatttggatatcttctctgctaatgatctgtccagagtattttgaacacatttaatcattggctctatcaacattatcaaattttgtagtatttgatctttgttttctatattatcatccaatttttcagcatacttaacatatattgataaaagatctaccattctttgcttaaatgcaataactgtttctcttgaatctcttacttctaattttcttttatgcccagtgggaatttttgataatgcttcttttctacgtttaaatatttcagataattgatcatccaattccatcattttttcatcatccatggattcttcttcttccgcttcatttgcctctgaaaaatcatccaactcatcgaatttgacttcaccattctcaccaacgatattttcagggagattcaaagcctttactaacgcactagtggtttctctatctattgctaaagcatcctcattaaatgagtcttcagattcttctaagtctgataattcatcttcatcagatccttcagtttcatccattttatcttcgttatcagtatcttcttcttcttcttctttatcactttctataacttcatattcatcagcgccttcaaatagctgtgcaaaaccttgtttattttctctagcttgtaatacatctaaaattacttgcaattcatcttttccgatttctggaacaaattgttcccatacaagcaagcatgttttagacaaaatggctcttttctgggctagaagacttaataatatttcagtaatacccaggaatgattctgtttttttagaattataatatgcacataattcttcaatagtagacacagattcagtatcactgctgtaaagttgcaataaacagattgacagcaatgcctccagacccctatttttagaatggtccttagtatcttttgatattatgtttaatatatttaaagcagttttttttacttttaataaagaatcatctaattgatttttcaaactagctgattcttctagagtaaggatattttgtaaggcatagtattgccatgaatgcttgtcatttgtagggacaattgttagttcagacaatatagaatataacctttcctgggacaattctgataaattttgttctaattccaaatttttatcatttgtattactaaaagtttgttttttctttccagaatttttactggagttctcatcgtttacaaaataggtgaaacccactaaacctcttaataaaggtaaaacaacctgttttgtgttacttgttaaatcggatttatgatttctaataatatgcaataccatatctaatatgaaccggatatggtttaagtcgttggatgtattaacttgtgaaagaaataggttaatcagttgagatagggtttcattagaaatctttttgataccaactaatttactaacggttttggtcttagttaatttatcaaagttgatcgacccatgtttactaaataataatgcattgagtgttggtactagtcttgtctcgacattattttcacaggtagttatgatgcaatgaagtactttttgtgaaattttgtgcaactgacgttttgaatcattagattgattaattattgatctcattatattttgactgaaacaagttggtaatagatcataatttaccattggaaatgccttcatgaaaattaaaaaaccaagatattttctttctcctgaagctttatcattaaaaaatccctcatctactaccactttccagaattctggaaattgaataagtgccattttatttgactttgaagctccattattctttttttgtttctttaaagaaggttctgcctcggtaatcatagtgttattatgaagcaattcagacagtaagacatcccaaacaaaatgtagtcgaggtgaccaatttgcagattgaattttgttatcatttgtttcagaattattattagggatatttcttaagacattggctagaattggtaaattgccttttgccaatgggttattaaatttccaaccattattttctagactcagattaggttttatagaaatgtcatattttcccagtaaaagatagatagataacccctcattagttgaagtaagattattctcatctaacagagaaattatgttttcaacaaatgttgtatttttctgtttgttaatcagtctttcaacagtttgataaacagtgaaaagacatgattctttaatccaattttttcttaacgccaaatcaattaactctttaacaaaggttatagaaaaatcattaacttgttgtttatcatcgaagaatactaaatcgaaaagtggatcagctaataacgtttgtaatccaaataatttcccaaataatgaacctctttcctcttttcctttttttttacggttgttattggtagatgaagccttagttgaactatctaccattagagttgtagataaaaggctcaaaaacatgttgatgctttttaaacaatccggtgccttttttggtcctgatttaatggctaggtttataacttcggtaagacacagagaaaaccctaatctagcactatttctatctgatgctaaccctttaattaatctgttcaatacatatgaccattcttcattgcattcaggtaaaggtaagtcggataattcatttatgagtcctacagcagattgtagcctttcctctggtaaatcagatgctaatttataaaaccaatctctgttaactttggttgtcattttggttgtcctatttttgtaggagactagttgttgggaagtattactaaatttgaaggaatgggtctcgtttgaaatattctttaaacacagtgtttattatatcataaaggttcattgtcttggtgtgcaaaaaaaaatattatagttagtattgattgtcatcttccaagtgatgacccgtgaatagtgatatgaccatgtttagctaagttgataatttgaataaacatagaatatatttacaatgtcaagataccaactgtaaactttaattttgtaagaataggttctcagtagatatattcatttaattttataggaatatcattttgaattttttaaaagagaattatgaatctggaatcaatcttaaataaaatagcaaaaaagaaggagaattcaaaattaaaataagtttgcaccagattaaaatttggtacttgcattactcctaagatatgtttgttaattgattttcgcttttacatatacaatatgccatatatttggttattcgatggtggtgattgtgatatttataaaaaagacacatatttcttctttttgcataaattaccttttctgaagcatgtaaaactaattgtgtttgagacaaaaatacaggtagtaatatatatatatatatatgtggataaatgtactttaaataactaactgagatttcttgtgtagaaagtttgttttttcattcattggctattattcatttttgaagtttcttgcatcagaaaatatggtatcttctgatgctcgaagtctctaagaatttttttagtaaacagaatatagatactttcattctgttaatagtaaattagaatagatttttaggggataatttaggacttgttgatacgatatagagagagctacttgatggtcctaatgattttaatattttagtgacaatctattttaaatgaaacatactctaaaaatagatacaagttataacattgctagatgttcatacttatatagtaggaaattttatttattacctaaattaattaatatggcaactttattcaggatgtattatattatatgttaaaggaaatatcaaagttataattaacctatatttagagaaataatgtttttggtaaatagataatatgcaaaatactttttctatttcctataggtttgtctgtatgttctatagttcttcttatagtagtagttggtgaaattattacatctaaaaagtctatatcactacaaatagattgtccttgtattgtagtgattaaaaaaaatattacaaataaattaaagatatgataaatggaaagttatcagaagagatatattcttccataatagactttgatagaaatagttcttcttactttattttctcttctgggaaatgtgcttccatataaaacatagaatacagtagaaataagtagatagacataaagtagcacatatcatgggtctgttgtttttttccaatgcacattgttaatgtatttacaacgttttgttcaataataagggtttatttatcaattatgagcttgagagataaaatggtaatattgagaagtaattgtacaaaggattaaacaatatcatataaaaacacgtagaaaatagaatatacatttctttgtattttttatgcttaccttgataattactttttgtatgttttgaatcttacaaataattgttctttaactatatgtaatagataaaagttggttgcaagagagaggctcttttagaatgtaaaatatgacaaacaattctttgtggttgtcctctatacacgacatgtaaactatgctgtatataattggtaaacagagatacattaatatgtagcgatatatatgtttataaagcaagaacaacgtcattttcaagtaaaaagtacgtgagatcatctatggtgacatcaaaggggacatgtgatatatgaaatccagatgttagcataaacgatcttgtggactccttggtcgacgacgacgttcttgtttttcgtgtttatcttgcttatataattatgcgtatctgtatatcggtgtgtattagtttactccttgtgtagagtatagtttatatgtcatatatagacaacaaatcaagctatatctatctatttagcgtctagaagagtatatctcttgtaatcgggttttcatctattacaggacatctctgatattatgtaataactctgaggttatgtgtttctgataacagtagttcttgttgaaatctcaataatatttcacatggttagatataagatatagactctttctatatctctagatgtaatattcctatatatctatatatctatatctctaatctaagataacctgatagtatacacttatatactatatatctaaacttatgtaatcctttttttgtcccttgttcttttcttccttccttgttgtttctcttgtacttatgttggttactcctgtttttatctatgtttgtaaaattttgcaaaaaggaaagtttagaaaaatatcgtcaaccctcatttttctaaacaaaccctaaacagtaatatcaggaatattacatattatagtaaaaattggaaaaaaactccgcgacggggaattgaaccccgatctgacacgcgacaagcgtccattctaaccattaaactatcacggaactaaactgctgtctgtgctgtagatcaaccttgatattatgattataaaaatattgttagggttttgtgatgattgtcaagaaaagttctagtttggatttataggacttagggtttgttgataaatcccacatgattgttgaatactatgtaacaaaatgaaacattcatgaaacattaaatagctaattaaggagaaatgtatctacggtgacagtcgttacagaacctcaaataagaaactatcaacccatagttcatatataaaggaccagtatcttggtatctaaatttatatgtttggttgatttataaaaatatgtagcacattgtataatacaaaaaagaacaagcaataatcgtttaattctcctagatatatataacgttcttatatatttgttattgcccttactattcgttcaatagtactgttaaaaaaaaaaaattggtcctaagtccaaactataacagtctgctgctgtggaataaatagttataaccatcaagattacataagatcctgaatgaatctagaactatttattgtctcaataagccatacacgtgctacaacattagatgctgcataataaagagattggattacataagatttttggcaaatctagaatttacctattgttttaataagtcacacgtgtattactaatcaccatgattagagaattggggtgcagttctaatccactagtgcacctaaattaatgtaatgaattttagggtgaatcagtcaagtcattaatgtactaatctgaataatcgatcgagctccagaaacatataaaaggacaacttttctggagataaaagatcatcttccataaccgttttttgtaaataatttatatattatatataaacataaatagaataacaagcaagtaacaagtcaagtaacttcgaatacatatattagctcgatataaaccgctcaatatataagaccgttttagtaattctattatcgactatagttgattactgtctcgattatttgaataactattaatattatttgcgcttccctggaatacacatagaatctcaccatctcatattacaacagtctgcagttgtataataaagaggtaacaccaccgagattacgtaagattctatctgaatctaaagtgatctattttgttttaagtacaacgtgtccatttgccacctagtgtacagcgtgttcacacatctctgttactgcgctaccataacatattatgtttatgtacaccgtgttcattatagtttctactacgccaccataacctattgtcctaaatgttctatgagtttcgattatattattgtaactaataataaagatatggattactaattcattaatatatcaagttgaacagttgatcgagttcgagaaaacatataaaaggacaacgttttctgtagatggaactatcttctgtcactcctctcttatacataatttatattgttggaaaatgagagtttattactatcatttccataagaattatttttaattagtttttttgtatattatgtggtgtacgaatgtaccataatatcagaaagacattttatttttcaccaaatatgtttttcagagatttgaagaaacgaaaaactttaaaagaagacttgaaataaatacaagaatgtatactgtgtacgctatataataagtatatacatgtatttaatacaaaaataaaatcaacatctataacttaatgatatctgagataaccatggacgttaagtgctccaaattctaacatatgatgtatactgtatgaattcttgtatttactttgatttttcgtctaaagttttttatgtcttcaaatctctgaaaaacatatttggtgaaaaagataatgtttccccgcgtattatggtacattcgtacaccacataatatatggaaaaactagttaaaaagaattcttatggatatggcaataataaactctcattttccaacaaatttaaagtcatattcggtcaacgcatttaaccatttaattactctgcgagaggactttttattcttttgtgcagttaatatgctaatgtggtctgttttcaatataaaacgcatgccatgaagcacatatttaaaatgttgtaatgcttgaacgatggcttaaagttcaagatcgttagccgagtaattgttttgagtgccttcgtaaagtcttggaaaaatagtccacgacacctaaaagtttttcttgctcattaatttcttcaagtacagcacctaatccattttttgaagcgtcagttgttaatttgtaattgccatcaagtttgaaaaaaactaatattggatttgagattatgtgtgactgtaacttattaaaactctcacctcattctattgaccacttacttttaccatgtatgtagtcttatattggttgttgtaaatgacagtagcgaggtatgaaacgtttataataatttatcatgcccaaaaattgttgagcttctttgatggttttagacgtgaggaattgttttatagcggcacatttcgagatcaacgggtgagttttatttgttaaagttgtatatcctaaaaattcaatggacttagtggcaaagttatatttcttctttttcataattaatccctcttgtcgcagcctttacaatatgatgtctaaatgtttccaatgtttatctaaagtacgagagtgaactaaaatatcatcgaagtaaacacaggcatatggtgaatctctgaataaatcagctgtacaacgagcaaaagtgcttaaggtattaacgaagtcattacgaaacaagacagcatgacagtatattcatactttccattaggggtgacaaaagcagttttgagacgatcatccatttccataggtatttggtgataacctgagtggaggtctagcgttgaaaaatttgttgacgagccaatcttggctaatagattgttaatcctaggtaacgggaacgggtctttaacggtcacagtattgagagctctacagtctacacataagcgatatgtaccatctttctttttagcgaggaccgccggtgaactacatggtgacttggaagaaactataagtttcttttcgagaagatcagcgacgatcagatctatttcttgctctagtattggtgtaatttgatatgattgtcttctgggtagacgtgcaccagatttaatttcgatttcgtatttgacccttgaagcttcagtaaaattctttggtggtagatcattacggaccgtagcagagtatttatcctttaaccagcgaggtaatttatcaaggtgatcatcatcaccaattacggaaacctttatggcaagtgcagcggcagtattatcagcatttaacttttcggtatcattttcagcttttacgaatatagtgtattctgggacgggtttcttattatttaatatcttatggagcagcgggtgagatgatatgatcaggtgcccaattataatttcaaaagcaatggaatctgttgtgtatatgggtgttttaatttttatgtcatcaagttcaagtgaaatttcagcagattcattagtatgggaagattcggatgatacaacacttctaaaacggaatggtagagcggcagaacgtgttaacttgagactatcagcaatatcagcactaatgaatgatgtgggggaaccagtatccactaaaacattaataggtttctctttaataagtattttaacttggcaactgttgcctacgagtgagtgagaagcagacacaataggagctagtgtgatagtgttgttatgggactgctcttagccttcattggagattgctcgccttgtggttagggcagtcactgtagcagtgtaatgactggtaacagtagaaacataagccatgatcaatacaatatcgacgaaaggagcgtttacttgattgtcttttagtttgggacaatttttgatttccctttctgcctccccttctttgagaatgataaacagtagtaatctgagggtggtaatcatcagcaaagtccacagggaccgggttgacagaagaagtcatatggatatcactatccatattaaaggtggcagcttccatagcagcatctacagtggtgggatgagctaaggctactttataggcagtgttaggagtaaggccacggtagtagaaaagtaattcgcctttgggagtccaaatatcagcgggtattaacgctaatagtcgagaaaaattttggttgtaagtatcaatgccaacattagcttcctttaaacgtttgaattcattaaagatggcatgcaggttgattatactgataaacttatttttaaagtcgatgagaaattgttcgtagtagggctggttatgattttgaatccattgggcgtaccattgggcagcgggcccagtcaaattacgaccaaaaaaagcaatacgttccacatctgtttggagattttgcgcgtaaagttgtgcttcaacagtgaggaggaaatcaggcaatttaaacaaatcatagcgaccggaaaaacgcattggagcggtactgtagttctttgaattagatggaactggagcagaagtaaaggttaaatcaggagctggtgttggacttgtgatattgtgttctgtggcattagaagaatcgatagcatctaaaaattcgtttacatttaagttgttatttgaagacatagtcaaaagaagcgccaccaattgttgtagcatgaagtaatctttagcttagtaattaatcaggaagcacagattatatcaaacggatattttattaatcgaaaacgctagttgtcacaattggtaagacaactactatacagtcttttatatattaaacgtctatatcgagcttagatatttattcgttgttcttattgttctttatataaaacataatttgtctatataagagaggagttatggaggataattttatcttcagaagaagttgtccttttgttggaaaatgagagcttattgttgtcattttcaaaagaattatttttgattagttttttctgtatattatgtgctgtataaatataccattaatagggggaaacattttatttttcatcaaatgtgtttttcagggactcgaagaaaaatgaaaagctttaaaagagttgaagtaaataagagaaggtatactatatacactatataatacgtatataagtatattaaatgtacaaacaaagcggttatccataacttaatgatatcaaccattatcatggacaccaagtgctccaaattctaacatagtatcgttgttattattgatgataacgatgctggtaacaacaaaattatcaataatgaaatcaaggagctgaaaaagaaattgcacaagccatagctaatacagaatctactgtaagtgaaaagacaaaaaagattaaagagttagggaaattgatcaaggtcctacaaaggattttaaatattggaaaagacacagataatgttcacatagaaaagaatataaatgttgaacaagaggtggatcttattctaaagaatcaagatataaataattataaagatcacatactcttatcaagaaaagatgaatatggtttttattatacctttaggaatttagatggacatattgttaaatattactatgaagataataactataaatttaacaagaaattttctaaacttgaaggagttcctatatgatgcagatcattatatagatatctaaaattacggaatttcatatgtaacacaattaacaagtgctatagaaatagataaagatcaagaagaaataattcgaaacattattattaattctatgactggtaatatggaaaattatgaatttggcaaaaaatcaggaattgaagatattttattcatcaaacaactactacgtggggaacttcccagaagggttaagggcagaatgtgtaaaaaactggtttttgatgagttctgtactaaaccagagagaattatctaagaatttatgtatatgcactaagtacaataaaaggtgatcaacttattacattgagtaggacaaagcatggttggttgcaacatcatctattgttcaagatgtccatgaggttctatcaaatttgtcaaaatttggagcacgtagtgttcatggcaatggtggtagtcagtaagttatagacacttgttgttttttatcttaaatgcatatatacttcttatatcttttatttagtataaacttctttatttattcgaacacttgttttaaaatttttcattgcttcaaattttattatatgcattcaatgaaaaatcaaatgttttccgtatattatagtaatttttttatagtaattcagacatgtaaatatacatttatgcttgaataatttgtgtatttgagtactttgggaaaaagtagattttacgcctatatttgtcatagaataagtgtttagtaaattggatcttaggattattaagaacattatggaagtaatatatactattatatgtattatgtttataatcaagtacaaatttatttgtaataattttatttcatttctaaaaaaaaataataactatataatagaaatagtttttaataagtaaaaatacagagtatattatttgttttctaacaaatacttttttttgtttttccaaaaatttgcaacttagattcgaaatcttatagaaactatgacagatagggctttatcaatcatctattaatgttgtaaaaaattatttacaggaatacatagtcatcggacgctagttaggtttcttataattaatatctaaattatttatatacttttgtctaataatttcaataatatcaacattttctgaattttggaacgattttatattgtgatataggaaaatattgatttaagaggttcaattaaatcctaaaacataatgtagctatgtctttttgagaatattacatatagtgtatttatttttagaatttttactatgcttcagaaagattaaatcgtgtcctaaattttttttttctattgtttgaaattgagttttcacacataaaactattatttgtagtaacgtctaaaggtgaatgttaattatgtatgaacacccacagtttataaactcgtttattcaaattaataaatcatttatccaattattatctcccttatatggacacatattcagtaaaaactaatagatatgtgttgagaatgagcgcctgtactcattggatatatagtaaacattctcaatattatattaaacagatttagtacacaaaattataacaaagttcttcactttctttctctatatacaacatagaaataataatatacaaagattgtaaataagataaaaataatgtatgatgaaatccttggctttatatatgttaacattaagccactttcctctacgaacagtaagatatttaataaacaaactcaacaacctttagtgacctctcaaaaattattactcaacaatttgtcgtttagtgtctgctaaaatcttattgttctatctatttcattatagaacattctatttcaacaatatgatatcatatccatattggtaatcacctctagaattctctctcattaattaggtatttcttcattaaatttttcatcgatatatcattaattttaaactgataattggtttatcacactaatacagcctaaatttaaggtttcagctgtttcaagtcctttcctttgacattaagtaccatccctcaaactatttactttaagatcttcaatttgaatttcttaaaagatattgtttattttttaaatgaagctttctactactattgggaattaggtggttgctaaaataaattattttgtaaatataaaggaaaaccagtaagattttatctccagctaagtgatcatgatgaagtaaagtctgttaatttttataggggttgaagaaaaatataattaatgacaggtaccaataaatataataatatatgtgaattgagaaaacctggaaaaaattgtctatttggagaagaagtaattctatataaaaattataatgttgatattttattttagatttaatatgactcagttctggaacaccaaaatacaagatccttgaaatattgaacattttatttatttcactttaatggcaattgattattacaaagtgtttatcatgcatttatatatatactgtatcaagatttttatctgtaggaacatagcaataaatacaaaagtacgaagacatcagagttgcctaatagttcccttctctatatttttcaactgctataaaatttgtaagtattatatataataaatatatgaatattcttcgctataattatttgtaaaatagtggtctattatgatttgcaaaaaaagaaaattttaatggattaaattctatcacaagcaacaaatactttaataactatattaattgcatattcttaacaattatatatatatatatatatgattaaacactagctaaaactaaatcagttatttcttttgataataatttaacttgggattcatcactacattcacaatatattctaacagcatcctcagtacctgatgctctaacaaaggaccttccttgattaaatttactgaaacattgttcaatttttgtttgtaatcctgtgggttttactaattttctttcttgatctgtggtttcaaataatgttctatctgggacgatgactttagttaatagattaggtatatcatgatactctgaatcccaatcataaggagtcaatcctaatgtgattaaaacgatcaagacacccaacatgtcagatatagcatcacccaccgtatgatttatgatgttactgaaatggtacagtttacgagcactttcgttagtggacattctatctttgattaaagagtaaaatttgtctgagaaaagaactgtaccatgtccatttgcttcgaaatagatacctatatcatatgatgattgagcttcatgatgcaggtgtttgacacctgtcttggtacacgatacagggacacgcaatgtttcactaagatattttgttgaattaccatttgcgtatgcagtttggactacacctagttttagttgatcttgcagattagatttgatcaataatttttgcaagaatttagcgaaaagtgttgagattttatccccatctaatagatgaaaaattttatttgagtcttgataatagaatacaatacgatcagcatcaccatcaaacgaacaacataaatccctggatgtgataactctatgctgctgctgctgctgttgtggtaatctatgctgagtcttaacaaaatctgcaccacagttaacatttaactcagatggttttgtataattattgttaataatatgaatacgatctttaggaaaactccaatcttttagaaatagttccaattgtctactaccaacaccgtttgcggtgtcaataaaaagattatcgaatggtaaagattgtgccatatcattgttgtacaatttattccaagaggattggaagaagtgattatagtttgagacagagacatcttcattttgcaatgatgtcaaataatgcaattggggtgtggtcaacaacccatgatttttgataacgacgtttcccgaaccaaaccaagcttggaccccagccaaaagacagtccaagagatgagggcttgattctcgtgaatcgtacgccaccataatatggggggtcaagggaccagcgacattactgattgattgattatcagtcaattttgaactgatgaaattcaacacagcagcataccagttatcaaaagtatcatttgaggccaagttcactaaatgggtaatttctggttcccaagcaggtaataacatatcaccattaggctccacgatcttaacaccgttatcttgaggagggttatgcgatgcagtgatcattacaccggtgaattttccattatgtgtcaatgatctagttgcggcaacgattcctgtagtaaacattacagtatctagtctagttgatagatctctaaaacctgcggtaccatatgcaaatttataattttttgtagtacaaacacgttccaattcagaacgaagtttttccttatcaatttccatatccatagttatctctctatctatctatatttatatctatatctatgtatatgtgaacgtgtctactcgtaacaaaaaccaaaatatgataaatgtaagccttgtcttttgaacttcatggttacctttgtaagacaaatgaaaccacacacatacacaaaaaaaaaaaacaaacaagaaaaaacaaaataggagggaaagaggaaaggagggaaaacaacccacagtaaatatgactaaacaaaattaaactaaaacaaaagctaaaataaaatgatgatgtagtatatatatatatatatcaagaaataagagaggtggataaaatttgatgataggacaagacaaaaaattaaataaaccttgacaactatataataataataataataataatatatggccccacaagtattaattgaaacaccaaccaacgtcaaagaatcattcctacatcattcgaagcacaagactttgaacaagagacaactgacccaatacaattgtttctttgaggttgatggcaaaaagatcaaatgccatccatttacgagatatttttgggaatgtgtacactacgattcaaaatcgaataaggaaaccacacatcattgggaaatggatgaaaataatataaacaaataaataaacacacaaacaaacctcaagactcaataataaacaataaataacaatatattcataaatattatcatattttgtattcttattttttgttcttatgaatttgttattgttcgatctgttctcaaacaccccttagaacttgtggagatcagaaatcagtgatgctattgttatctgtattattcaacagaagtgacatcatctaatatatagaaatacacacaaatataatatctaatatatagtatgtagatgctttagatagagcttgtaaaaacataataggctggataatgcatacatcactccgcacggggcagtgaagcatacacccatccatccaacccttttttttatattactacagttgcacttgcagttgtcgccctttaatacgaagtgtgggtgtgtggatgtatggaaaaaaagaagaggggaagggcggctttgtcctttttggttttcgttgtttcctttgataagagatagattatatcttggtatataaatgataaacttatgaaataaaaaaaggatgtgtctatgcgtgtctgtatgtgtgtgtgtgtttatcgttttttccttttcttttctgttcctgcttctctctcatatttatctagatccacacaaggacaacatactctattcaagcgaacgtatccatgaaattaactacatctactttattggctgctgccactgttcaatatgcctctgctttggtcattcctgatttaaatgcaaataataaagactctttaacactaaaaaacaaagaattcgataagaccaataaaccctccatcaataacaataacaataatgttaatattaatattaagaacaaagaccaacttgcaccactttatgtccatccaaattctaatacagctttagattcttcctcttcttcttctcctcctctaaatattaaatctaatgaagactttatggcttccaccattaagaataaatatatcattatctttaaagatggtatttcaatagactcaattaatctacataaggaaatgatccaacaagcataccttcaatatataacttcgttacctaaggaggaatcttctgaatttttgaaatctttgccaccccatttagacgtaggtggtataatagactctttccaaataattggaagtaaactaaacggctatataggttactttccatcctatatcatcgacatcatcagacgtaatccattgattaaatctatcgaaatggattctattgtgactataaaggacttcgacacccagaataatgctccctgggggctagccagaatatcgcacagagatccactaacattgggttctttcaacaagtatttatatgatgacaatgctggagaagatgtagatgtttatgttattgacacaggtatcaatatcaatcacaacgattttcaaaatagagcaatgtgggggaagactatacctgacaatgatctagatatcgatggaaacggccatggtacacattgtgctggtactatcgcatcacaacattatggtgtggccaagaaggctaacgtcattgcagttaaagtcttaagatcgaatgggtctggctcaatgtctgatgttattaaaggtgttgaattcgctgctttgagccataatcataagttaactaagaaggataataaaaaatataaaggtgctgctgctaatatgtcactcggtggtggtaaatccccatctttagatatggttgtcgatgctgctgttaatgctgggatccattttgctgttgcagcaggaaacgagaatcaagatgcttgtgatacatctcctgccgcaagtgcaaaggcaataactgtgggtgcttctactttatctgatgatagagcctatttctccaattggggtacttgtgtcgacgttttcgctccaggtttaaacatcttatccacttatatcggctctaatgacgctactgcctctttgtcgggtacctcaatggcttcaccacatgtggcaggtttattggcatatttcttatctctacaaccagacaaggactctcaatttagttcttattcacaactcactccagaacaattgaaaaagaaattgatcgattattcaacaaaaaatgtcttgtttgatttgcccgaaggtacaccaaataaattgatctttaatggtgccggtcaagatttatctgatctatggaatatttctacatcagaattaggtcttgatttgaattctgctgaccaaaacgaagacaataaagaccaagtattactccaggaatattctaaaataggattattgtcaactgacaacatgtttgaacaaataaggcatttatttggtagtatggatctattttaaataataggaaatgttttattggaggtttgcctgttcagttccttctaataacaacgaaaaaaaaaatactgttttattgataccattatttttgattgctttttttttttttttttcatttctttctcttattcattttatttcatagcataggattttaaatcatatatatgtatatatattcaattttcatataaatttataaataataataacaaattaaaaaaaaaagatagtcaaaaattgaagatcaaccttattttattttattttacataattattttttatattatctctttccttcatctctctaagtacttaaacgtctttcgtgttttttttatcaattgtatgatactttttgttttgcttattgtagcttgttttcttaaatgcaccctattaaatataacaaaaatgctaacagtgctaattacctctaataaacatatccaatatttaaaaaaaacttttaaataattgctttggtaaattgcgattaacattaatccgatgattattcaaatatattcaccgtttggatccaaggtttttgggtccttcactttgcaattaagttttattaataaggctgtcaatttcaaggtttactcttatatcttctcaaatcaaagcacttttaaatacaaaaatattaatttgaatttgtaaaactataatgaaaatgcttaactatctgtcatcattttacataaatacatacatacatacatataaacaaatattataacaaagtggaggcaatactattggcagcagttctaccaaacacgacgcattctaacaaactcgatccacccaatctgttagctccatgtacaccaccagaaacttcacccgctgcatacaaaccctgagctactggtctaccatccttttttaacactcttgcattttcatcaatcttagcaccacccatagtgaaatgaaccactggtgtaatttctcctacatatactatttgatcctctgtaattggtgtatcccccataaaagtatttataactaaagatcgattgaattcatcgttattaccattctttgaatatctttccaattcttgaaccatacccacagtagagacagaaagattataatcactcactaatcccttgatggtagtcttctttaaaagtttcttatagatgtaaaaatccatgctatatttataattttcgtaaactttttcacttaacactaatatggctctttgatcatcctttggtgttgatgataagatagctgcagtgacattatctcttgtatccaattcatttgtgaatcttttacctgttactgggtgtaataaaataccgcctaaacctctcaatgcttctgctgctaaaaatttcttattattatcacgatcagtaggatcaataaaccctgttgggtgcacttgaacttgatccatatcaatcaactcagctcctagcttctctaatattatttggccttcacccaaagtttcaggaccatttgtagttggtagaccgatcagatctggggtgaacctttctaacaattttttagaataaccaaatccacccgatgtgaaaataacattagacgtctcaatggtatgtgaattccctgactcgtcgacataccgaaccccactgacttggttattatttagatcaatatcgacatctacaactttactattcaataaaattttaaccatatttggattcctcttcgaaatctctttgagtctgtttgaagtagtagaaacaatttcaaaacctggaggcaacttaccctttgatctgtgggtccttggagccgaatgcccacccagttgtactaaactatctaattttaatccaaaatcttcttgtaaccatgaaatggctccactagactcatcagtcaattttttcattaatgatcgaatgcctctatgcttagctgacttgattgtatcctttaaaaataagtcacttgaatcttcaatattaaggctttcctgagttgctgaaaaagcaccattaattccacttgatgctttaatcgagtttccaccaattttctctgctttgtctactaaaataattggaatattatattttgtaactaactgatttccggctgaaagaccagcaagaccagaacctacaatgactactggtttgaaatgagaagtactagaaaaaaatcttttcaaactgaatgagctaagtgaattcaacgatgacttcaacattataactacaaaaatgattaatagaaaataaaccagttttcttaaaggtcttctcattattgtaatacgctaacaaaaaaaaagataatataacaaagaccactagtatcaataagatgataactaaaaaaaagggaaaaaagattgcactatatctaatataaacgtaaaaaacacttgatttcgttagtactcaagaatcaatcaaacaaaacgtgaagttctttttaaatagtcatcatactactgattggagatctaccttatcatatatatcgatgccttcgagctgtcaagccaattactaatcttttaagtacaaatagcacaaaggaaaaaaaaacaacaaagaaacaaagaaaaaacaatacgtgtccagatcgcagaaaaagaaactacacgttaacaatagcaataatacctagtgtagtgtgtgagtgttatttctgtcagtaaattgatttttctttcttcttttctcactctgcactccgttggtccacattcttcatcactgccgcgattaaagtcagaagtgatgagtgtcggtcctcataagtataaacatacaatcgaagaggaggcaacaatgtgtgtgtatatgcacatgcacgtactgctactacactggtgattgactgttgaagtaaaaaatatgataacgtccgttttaatgcttatataattgattctatattttgaaagacaaggggtgatgtttctcccatcccacacttcttctttatacgtatttacaagatttatatcactacacgcacagttttttattggtactactactgtttcacgttctaacccattccaatatatcacctatgcttcttggcgattttgtatagttcaaagatggcagctggtgtcataccttgaattctacgtgcttgtccaattgtagtgggtttcactgtatttaataacatcttacattctgttgatacactaggaatactactatagtcaaaatctggaggcaatgtaatcatttcatctgcatgaaacgctcttacaaattgattctgttttacaagatagggttcatattttgcttggacatccactttcaaagcaatatgtcttggtatctccttataatttatatttaagtctggtattactttggacaatagttgtaaagagactccttcaaaacggaacatcttccatgctgagttctttgttgacgaattcccaattgggatatttaaatagctagaccatctagcagaacttaaagaaaacgtttccagttttctctttagtgaatcatacacagatttatctgattgaaatttgttccatcttttggatgttatgactcctaaatcatacccctttgaggttaatcgaaaatctgcattatccgctctaacacttaatctaaattcagaacgtgatgtaaacattctatatggttcctcgatacctttagtaattaaatcatcaattaatacaccaatatatgaatcagagcgagtcaattttagagttggtttcttcctggcaaccagccccgcattgataccagcaacaacaccttgagcacacgcttcttcatacccagtagtaccattaatttgtcctgctaaaaataaccctttcaccagcttagtctctaatgtctgtttcaattgtctgggatcaatataatcatattcaacaccatacgcaggttgtaaaattctgacattttcaagaccccttaccatccgtaacattttcaattgaacatcttcaggcatggaattggatatcccattggggtaaataacattggaatctaatccttcaggttctaaccaaattttatgtgattctttatcaataaaccttaacacttttgcttctatggaaggacagtatctgggtccctttacagtttctttaatatgaatactctgcgataaattttgtaaaatataattatgcaattgattatttgttcttgtcccataacagtgcaattgatccttgatggagacttcctcatttaagaaactcatggaatatggatctttatcaccttcttgaatctccagtccattgaaattaatacttgatctatctaaccttgccggagtaccagtctttaatctacctaatttaaaacctaattcatttaaggtgtcactgatcccgtatgttggatcttcattgattctacctgcaggaaaacttttcaaaccaatatgaatctcaccattgagaaatgttcctgttgtaataaccacagtcttagcactcaaaatttggttactttcattatccaaaattacaccacagacatgcttcttccttggatcgatgatcaaatctttaactttcccacttgataatgataaattaggatagttattcaaaatgccttgtatcccctttaaatacaattttctatcaatttgtgctcttggaccccacactgctgcacctttgcttctgtttaacatcttaaattgaatacctgcatagtcagtaactcttgctaccactccatcaagcgcatcgacctctctcaataaagtacccttccctacaccacccatactaggattacaagaacaagtaccaatcttatctaaatatggtgttattaatagggtatcactacctgttctagcagcaccagtggcagcttcacaccctgcatgaccgccacccacgacaataacatcatgatgaggacatgaatcgaggattctttgaattgaactatctagcataatacatctcctggagacatttttataccatttcacttcacataaattagctacaccagtttttacaacgttccatccccacatatcccactttattgtaactaataataatactactgtactactcttctccctcctcttctatttggtttttgttttatctgacccatgtcgaatacataaaataagagcatattttgaaatatatataaatctagggagagtgaggggaagaaggagtacaactgggtcagcaatgcaatagcaatatttcatgatgtgtctattacacagatatatatctactaaacccctctgtaaaacccttcaaatattcaaaactcatcgggacaaatgaaataaaaaccgaactagaaaataatcgccccacagaaaagtcgaacactcaccaattcactatacatgataaagatcaatttttcttttttaaattaaagcaacaacaaaaaaaataaaaaaaaaaagaaaaaaaaacaaaactggaaaaaaggtaatttttttttctttttttggattttggagtcacaaactgagtcaaattcggagtcagaacttttttttttcatttttcatttattttttcctttgttagccttcaaggagaatcttcaattaattggtaattagtgattctgatgatcctttgtatttgaatatataaattatataatttatccgtcaagttgtgcattatgttcttaactctgactcatggtattcaatgggaaaaatactatgaaaggagagttagcaattcgtgcatgctatttaactcttgagaacacttgaaagaattcgatataaatacttagtaaccacaaaagtagttgatcgcttaatccatatactgctctctttgtccagttttccagggcaattttccttagaattagtttgccatatcagttacttaataaattccacatcgacatatcaactaccacaacaaacataaaaactcctataatatatagaacacattttttataactttaaccatgtctttaaatcttttagtcctagggaatggtggtagagaacatgctttggtttggaaattatcacaatctaaaactgtaaaaaagatatatgttgccccaggcaacggtggtacagccacaatggaaaatatcgttaacgtccctgaacttgctccggttcctgcgaatttctctaaattacaaacttttgctcaagaaaaggaaatagatttggttatcccaggtcctgaacagcccttggttgatggcataactactatttttaataaaataggtgttccagtctttggtccatctaaagctgctgcacaattagaaggttctaaagtctttgctaaagatttcatgaataaacataatattccaacggcaagatttttttccactacaagttatgaagatgccaagaaatatgttgaagaaattgattatcaggttgtcattaaagcagacgggattgctgctggtaaaggtgttctaatcccaactacaaaagacgaagctcttgatgctttgaagactgttatggtagagaaacaattcggtagtgcaggtgatgctgtagtcatcgaagagttcttagaaggtcaagaaatttctattcttaccatatcagatggttactcttactacagcttaccagctgcacaagatcataaaagaattggtgagaatgacactgggttaaacactggtggtatgggtgcatatgctccagcccctgtagccacaccaaaactattgaatgaaattgataagactatcataaaaccaacgattgatgggttaagaaaggatggtttaccctttgttggtgttcttttcaccggtttcattattactaaaaatggtccaagagtgctagaatataacgttaggtttggtgatccagaaactcaaactgttttacctttattaactgaagatactgatttggctcaagtgttccttgctgctgctgaacataaattagattctgttgatattaatatcaaacaaaactcctttgccaccactgttgttctagctgctggtggataccctgaatcttacaataaaggtgatgaaatcactattaataagtctcaattaccaaacgattcttacattttccatgctggtacgtcttttgatgaatctagtagcagaatatttacttctggtggtagggtaattgctgcaactgcagtagcttcaactttgagagaagctgtagatcaagcttacaaagccgtcaattgtatcacgttcaaggatgcttattatagaagagacattgcccatcgtgcttttaaagatactgctgctgccgataacaacaaagtatctatcacttatgctgattctggggtttctgttgacaacggtaacttattagttgaaaaaattaaagctatggtcaagtccacaagaagaccaggtgctgattcagacattggtggttttggtggtgtttttgacttaaagaaagctggttataatactaatgatactttattagttgctgccaccgatggtgttggtactaaattaattattgctcaagaaacagacattcataatacagtaggtatcgatttagtagctatgaatgtcaatgatttggtggtacaaggtgctgaaccattattatttttagattactttgcaactggtgctttagatatcaaagtcgcttctgattttatctctggtgttgtcgaaggttgtttacaaagtggctgtgctttggtaggtggtgaaacttctgaaatgccaggtatgtacccaccaggtcactatgataccaatggtactgccgttggtgctgttaacaagaatgctattttaccaaaaattgatgaaatggaagctggtaacatattattgggtttagcatctgatggtgtccattctaatgggttttcattggtcagaaaagttattaaacacgttggtctttcatggaacgatccatgtccatgggacgagaccaaaacattaggtgaaggtatcctagtaccaaccagaatctacgtaaagcaattattaccatctattaataagaatcttttattaggtttagcacacatcaccggtggtggtttaattgaaaacattccacgtgctcttccaaagcatttacaagctaaagtaaatatgtctacctgggaagtaccagaggttatgaaatggtttggtaaagctggtaatattccaatagatgatattctaagaacattaaacatgggtattggtatggtcttaattgtcaagaaagaaaatgtcgcagaggtcaagcaattactagctgaagctaaggagactgtctatgaaatcggtgaattggttccaagaccagaaaaccaacctggatgcgttgttgaaaacattggcaatctttattagaatttaatattatccttatttgtttttttctatagtttatatcttctttactagcatatagaattgtatttttcgtaaatcttttctctttaacatttagatctatttatatgtgatgaagtatatatatatatatgtatattgacgtgtcacgtagagtaagataccaaataagctacgaatattcaaatatgagtgtagggtataaggatgtggatcatgtgtctattattacttattaacatataaaagttgatcgactttgtaagttttctgaaattcatttgaaatacacaaatacacggaatttaaaccgaacataaacggaaaaaatttaaaaccgtataaaacagaatcattttaaattggaataccaataacaataataatatagtttgacaagcccctatctaatttaagatttactgatcgtaatacatttttaatgttacacagaaattgtccaagaataaaaacataaaaaatattagaaacaacatcaaataataaacaattgtgatatcttcaacgtcctatctgaccttccatacaatcgatattttttcaatatagataaaataaaacaaaaaaaataagatcaagacttacttattgataaatggaacaagaatatagctccttgtctgaagagttccaaaaaatattattgacttcttcttctgtgactgggcccaatgctttaaataaggctgaagatatagatatcaatggggatatatcggataagttgatcacctcacaacatgcggatttgtatgaagaagtcactgagttagatacacctgattttgataaatgggtaccatttttgagaggctatattgaaaaaggccaattgaatgctgtaattgatgaattggaggcttccattgatgataactttaaccatgtagaatacgaacttttacatgattctcaattgaatgataacctagaatcttttattacctctatctcagggattcaatctacaattcaaaatgatttattagatgaagtcaagtctttacggaatcagttaaaccaatcaactaatgatcttatttcaaaaaaacaatcatatctaaacaataaaaagactacattgaagattgcagaagctagaatcattatgaataaagttgtaaggttgttagaattatcaagcaattgccaaaccttgatccaagagagaagtttcttcaaagctttgcaaagtttagacatcttagaaagaatgtacttacaggaatttaaaaatacaaattttgattttttgaaggaattttacaattcacttccagtcttgaaatccattattgaagatgaatgtttaaatctaatcaaaaactcttttaattcaaatttgggtaagaacttaattgaagttggtaaaagcatattctctgtttacaaagaacagttatatcctgcatggattgaacgtaaaacttcgatgaaattgtattcaaatttttgttttaattcacctgcagaaatatctaccagagatcaaagtgtgttggaaggaattacttcagatcattttttcagtttggatgaatttcatgatactattttgatatttgaaagattaaatgaattaccatacctagtatctgaatttgaaaaggaatatgagtttagaaagtctaaaatagtatatccactatcatggaagaagactgtttctaataaccataaaggaacgacaacaacaataaatccaaactccataccgggtgagattacaggagatgcttttacagaacaaatgagtatcccgtttttctttgagtatttcgccaaaattataggatttctattgtatgatatacatctgaacaattctactgattttttattagttgatcgaaatcaaaacacgactaatgaattttggaaaaatttaatgaaccgattatatcaatatttgaaatattttttaaatataatgcttaataaggaggaagagttaattgaattcaaagacttgttagcagtattcatttgtattctagaaaattataaattgaatatagatcttttgtatgacatcttagtgtcaatattagagaaatattgtgaattaaaaattgcaagttttgaaaaggaatttacagatttattaaatgaggatgattttatgcctttaaaagtaaataatcgctcattatatgaaaaagtgattaaagtgtgttggttaaccaaagataaacaactacatgatacagttatgaaaaataatcaagataacgagggattttctgtaatattgccattttcccctttgtatccaatgactataaccataatcaagaagatttacaatgattttacaaagtttacgaatgaattttatagactcaacttatctcaaataaataacataattattaacaatatggaagccataactgatattgtgaataatatgattagagaaaaattggatagtacctcaagagaagaaatttctcaaatattaattaacttagattattttatcataggtgctaaagaaatgagtaattatatgagtagagaaaatgttttgaagaacccggatattgaaattagattatcagctatgaagaattttaccgagagtagaaaaatggctgaaaccaaattgattgaattaattgattctaagatatcagatatcttagaaacagtcaactttgaatgggattctaaaaatattagacaggaaccagatataacaatcattgatttaggccaatttttggagatgatgtttgcatcaactttaattaacttaccatatagtgttcaaacgctactaatttttagagaatttgattctttgactagaaaggtgttagaaattcttttaactgagacgccaaatcatataacacaagagagtgtgcataattttggtatagacattgaatatttacaaagtattatacctagaatcttttctttctcaaaggatgacaatgctgaaaatattgactcacttaccgttgataattaccacaatactaatagtcgtacctctacacctgtgactccatcgacaccaacatttagcggaccagctattcaaaacaatccaacaactctatacgagaataacataaaatctttagaagaaacattcactgagttaaatcaatgtattgaattgatgaagttaagagacccccaaatgtattcagatccagagatgagaatgaagaagttttcacgtattaaaagtgaagaagcaaagatattattagaaaaagttagaaataggactttatccaatgaggaaacctccagcaattctgatccaagtaatgatacgtctactgatgaaaaagaatctaccatagagttaaacacaaaaagattagctaacttctttaaccgtagatgaacactccactaggacacttatatatacatcatttgatataacctaatctttgaaccatcacttgttaatttttcataatttttatgttcttagatgataatctggaaaaaatatatttaaatatgcagaaataaaaaaaaaaaatcgaaaacaaaagaatatagtaagacaaaaatcagagaaaacttttcatgtacgttaatgactaacagtagagtgaatttattacaaaagaaagatctctaaggaagtaaccattacacactaaagttaatcaaattctgtattctgtttttttattattttttgatttttatttgtgaatctagtttataatctaatatctatggggaaacgtgggaataataatcatcaaaataatgacaatcaaaagagaaagaaattcaaagtttctactggatttttagaccctggtacatctggaatatacgcttcgtgcactagacgtaaggaacgtctggctgcacaagaactaggtcaattattagaagaaaaaatggaacaatattataaagaggaaatcgaagaattacatagtaactcgaaggataatactactggagaaacaaaagatcatgaagattctaacaaagaacaaaaagtagaagatttgtctattgaagaacaattaaaaaaagaattggccaatatgaggaagcctcaacagtccaagactaaagacgaaaagaaaaaggatatactacaattgattgacttgaactgtgaatgtatgatttttttcaagacgagacgtccaattgttccagaaaaatttgttaaaaggataatggaggacctaagtgacccaaacgataaattgaaaaggactagatatatacaaagattaacaccaattaccaattcatgcagtgcttctatggaacaaatgattaaattagcaaatcaaatattggcgccacatttccacgagccaaacggtagacatgattataaattttctatagagttgacaagaagaaattttaacactattgaaagaaatgatatcataaatcaaattgtagctcttgtgtgtcaaaatgggaaatatcaacatcaagtagatcttaaaaattacgagaaactgataatagtggaatgcttcaagaataatattggaatgtctgtagttggtggcgattatctaaagaagtacaagaaatataatattcaaagtatatttgaagccaaatttaaagataacaaaataaacgatgacaaggatataaacaagacaaaaaattagtagttgtttctttgtaaaaaaagatttaagttattcaacactaagtatttcaattccagtaatacatataagcaattaacacaggtacatacgattgcatatagacacataaacaaacttacatacagtaataataattaacttagaacgaataagattcaatacctttattataatcaaccaatttttcccacgcgagccaatcacttgtagtattagggagtaaacccatctggttcaatttcctgataccaataaacatcaatgcaccttgacccaatacataaataaccatagccactctcacttgaccttctatatctttatttcctaaaaccggtttgaaagcggttgcgataccaaacaatgccttaataggtcctaccaacatcattaaagtggtcataatagggataatttgtaaagatgtacctgacatatatgacatcacaaaattcataggaatagatcttgcaggaccaaacgctatttgccatgctttttgagtctgaagttgattgatattttggagagagatagcagtattagctgaattttttactttcaatttatcagaatgagtatcagttattataattggtttgtatccgaaggggggtaagagcgtgtcctttggttcttctctaaaagtcttagtaaaagcagggtctgttaaatttttaatccattgtggtaattccattgtcgtcactatcaaagcaatccaaatcaaaacaaaaaattcaacctataaaaaagctgtgctattaataccaattctctactttgaagggtatatatcaagcatatacccttccacaacaaatctgatatcatttcataatgaagtatttgcaggttaatgattatttttatatcaatccccacaccaatccgtataaaatacaattttttttcttatatccttcattttttatcttttcgaaatactcttgtaaatagcaatcttattttcattttgaaacaaaatagtagtacgaaaaagttgagtgaaatataacagtgttaataagcaagtatacagccaccattacaggaaataatgtaaactgtataatgaaatgttgtttcacttcaattttaatacatgcttttctcatgcactcgataccaattttttgctaattatatatactatatctataaatgctcaataaaaaaatatatatgtaaaagtgcctaaatcattagccttttcttcttaaccaaactttgtattcaccaatctttctcgtctcctactttctttattcattgcttacttcttgatcaataataaacaatttcttaatcttatcataaaattgtgattcagtcatcatatcatctaatttgttccctttttcactacctacacctgatactttgtcaataatgtcattttcaatttgtgtgttaacgatattagatccgtctgttatcatagatgaagatgatataggtatttgaggaagtaaatttccattaccatcatccatataattactaccgccaagtattcccgaatacatcactctcatatcaattaataaaacattcaccaggtaattccaactttcattattggagatccttttaaagtttaaaaaaatctttgaaatttcactttcttgtaaaaatttcaacacttcttctgtaataataacaagatgtcccatatatcctaatgcattattattacttttataaaacttgtagttttgtttgtaaccttcaataatagtatcaactatagaaggagatgtacaattttgaaataaactgtagacagaaccattgtcagaatccttttcaatatatgtgagagcttcttttgggaaaaaaagtgaataaattaagaatacattatatgatgaagaatcgattcttccatttaatatttgttgtataatatcaaatattacattatgaaacatattattccacgggcattttaataatgtagaaattaatttaggtaaaaagttttggtcaaataattttatcttaaattgatctcccaccatggcattttcccgcaacaatacatctaattgaattgaaatttctgtaatacaatatggtctattagtttcttcaaaattaactttattggattcagtgtccgatattgacccaaccatatcaatcatagtttttgaactattctcattgttcataatatagaaattattattatcattttgtgattctagcaaatttttctctattaaggagcgatcttgattaatttttaatgaaaaatgttttgaaatatgcaaattcagagatgtcatatttgaacaatgtattaattcagctatcaattctaatatcctaagtttaaccattccaattggaatatattttgtattatttcttgtatgtacaaaattatgtgattcaactagatcctgcttaagtggtttaatgagttcaggtaatctttccgtaaatgattgtaacagatcccctaaataaacgggatctctttcagatactgttctgttaatgtctaaaaatgcttcatcagtatatagtttatcataatctgtattattctttcttattagttcgataataatagtaacaatattacataacgcactaccaccttcccgtaatatgatatctactaagtcactagtaatctttgatgaacataattgtctagttaacttgtttgggccaatgctgaaatcatctattggaatatttgaggagatttctactaacatctttaaaaaatctgtgatacatgtttgaatagatcctgaatatttattattatcaaaaaattccaaacatttaggaatcaaattttgatcatgaactgtatcgattataccagttggacaatccggtttatcagtagaaataatttttaatagaaagtccaaaaggattggtatattattatgtctcaatatatcatcaaccaagctaggcaaatttctaataaaatttaaatagtctgtttgccgtgaaaataataaggtttcatgaattttcaaaaatattgacagatgcggtgatctttcatactggcagttttgttgattcaaaatagaccacagttttattaatctttccttcgatttaaccactaattcagtaatcaaccatattccaccttgagacaagatgtcagagatacaagtagccaacagtaacggactatatgaattattatcattatgtgttttgtaattatctattggaaaaatgctgtttatagtattttgcaaaattggaatattattactattattaaaatttgtagactcatccatagttcctaaataatcatccaaattattaaagttgggtttatttctctctagaaacgtctctttaccaatgttatctagacaccatagtagcttatcaattaaatagtcaatatgatgaactatcaatcccgtattttcatcaaagaaataacctaaacacagaaaatcaatcaatcgactattattaacattcacaatatcatcagaatcactattactattcctaattgatgataaagaaatcaattcatctatcaaattatcttctctcaatactttatcaataaaactactatttaattttaaccacaactgtatgttattactagtactgttaccattatttttattattaaaagaatcattactagaaaaaaataacagtgatgaaatactgctttttgaaggagatacagtcaaatccattttattgttaataacaatgtcactgctattgttataagacataatatcttcaattctcaacgaattaatcttacttaaatcataaatataatcactgtcatcgttattaataacatcattactataatcatcctcattgatattgctcgactttagcatagatatcttatcatttttcaaacttttagtatctaccggagtaattctgttactatctgtaccatgtaacaatacagatctcatatcagtattactattactattaatttctgaaaattttgaagacatattttcagacggtacaacattactatccaacgcctccaaacgccttaacaaatcaaaataatcatttagtatgtaatcaatattggatttcctaggactctgcggtccaaatggccagaatgacatatctcctcataaatagactagcaactccaaacttgaatacgcctactaaacccaatacacaacacgtaaaataagaacaaaaaaaataaagaaaaaaaacttaaactagtataaccgttgatgatttttacaattatgatgtttgaagattatatattcgatcttctttccacaattagatgcacctctatttgatctactcttgccactacaggatttcactcttttcatcacgtctatatctgctatttgaagaaagccataaactttttttttttcaatttttttaaaaaaaattcttcagtgtaatatttgcttgagagaaaaagcataagaatcaaataataaccaaaaacaacaacgtctcatataaccgactcaaaccttattgcacgtagaagaattttaattatattagtgacctacttagaaagaaaatttgcggattgaaattttttatagataaaataatgagaatcattaggtgcatcgcaaaaaccgtgattcttttcctagttttgttatctactttacgttactcttgtgataatggctatattacaaaacaattggattgtttatgtcattactctcgaattggtgtattagatcaaattttaactaataaatatcccgttggatacaagttaacgatacgtgatccattagaaccaaaaatcaattgggtatatgatcatattactagcggttgttcttatttgagtgaaaaagttaatgagaatgaatcattaagaaatttggtcttatattataaggaaagatcgtctattgttatcaataatatcactttaagaggtaaatttttatggaatcatttatataactcttatgactttgattcaaaattggttaaagtttctaaatttcgggattccatccaaaattctctaatgaattattttgattgtggtaagaatcatttagtttcaatagtcaagttatttaatgagaaatatgctactataacagctccatcatcttctttcccctctattttctcatccttatttatttttactgagaatacctcctcattgaccgttgctagcaaagctataagaagtgatttcgatgataaaactgaaacttttactatcacttctacagtatataaaacaatgacaggtacctatgatctatcaccctcagaagctggaacagcttgtattatcggtaattcgacaattaatgaaataaatatcaatgatttttctaatagtattgtattaaatgaacaagatattatacaaaaacaattcgatgactggactaattcaattgaaaataaagtgcaatctattatcactgtttttgataaattagtcaatgaaacaattgttgatatcactaaccagacagaaacttccttaaaacctaaattccattcttttatgaatgagacaaagacatattttaaaaacattactagtgccactaatgatattgactgcaaaatggagattgatccagtaacaggaaaagctatatattttgataaggatggggtcacacaattggaaaaatatattgatagacaatatgtccgtgatatatttcatgatttaaatcaaatgaataatcaatttgtagacatggtgcataatgaattaaagttattaatggatcaagtcaatggaaaagtggagcttttaagaaaggattatattgatatctatgaagagtgggctaatgtgatggttaatgaatggtccaagcgattagtgtatgccgacattgttaatgccaacactaatgatgttgacaatgatatgagcaataacgacaattggagaaactttttaagagtcaaggaacaaattattcaatccagagatgaattacttaatcacaaagtgatattagattatgtagagacatttatcaggcgtgtagaattttcactaaagatgttactgaaggaaaacggggaatatacgtatatcttacgttccaaagctaatcttgcattccaaaagcgtgagaaagaagaagctgaactgaaaagacaactggaggaagaactattaaagcaaaaggaagagggagaattaaagttacagttacaacaacaaaagagacataatgaaaacatcaggcaatttcacgtagataaacaggcacagcaacagcaacacaaccatgttgaagtgaaaggaaaaaaaaatcataaacaagaaattattgatattcaagaggatgttgaagttttcgaagattcacaaggagaagtaactgaacaagaataaaaccaataattataaaaaacttctacattattgttatcttttatttcttttttatttcattttatttcattttatttcattttatttcattttatttcattttatttcattttatttcattttatttcattttatttcattttatttcattttatttcattttatttcattttattttatatatctaactaatatgaacactgtatattcctgtatagctgtatatcaagtatatttagtatatttacatatttaaatatatatgattattggataatatatgcatatataaactgtttactatgttctattctgtaacaactactgtaacaaccaaggagcaattagggttatattaagtgcacatctttgttattttctcataaataataaaaataaacatctagggtatttagaaaaaaggcacaatttcctcttttttatgagctgaaaagttagggtgatatttgcttttctaccacattattaatgctctaactgtagaaagcagagaaaacctaaaaaaaggaagagaatcacatgaaagaggcagaatgaatgtgaaagaaagcagagacaacgtctataaccattctacatttatatttttataactataaacctgtacagcaaagttatttttaaagatagggattacaacaacatattttgtaaattttattttgtaggaccttgcaaaaaaaaaacaataataataataacaagaagaaagaagaagaagatatcaagcacacccttaatttttacatttgattccgatacacttttcattcaaaacggcgtccttttaagaacgtgattcaatatgactgattttatgaatccaatagacaaagaatatattaattcactgttccctgcttatttattgaaacaacctattggttatgatcttttaaattgttactatattaacaaaaaattattccaaaaattacatgaaaaaaggtcactggaatctactatccaaaaagatgatatagaagatgatgcaacaccaaacactgcaattaacaataataaaattaatttaagtgggttccatctaatgtataaaaacggtaaaaattcagatcaactattaagtgctgatttgaaaaaagatatctggtctaatttaatgtctttaggtgtattaggtacaattccatttgattccgttaatgatgactacttaattcaaatctatcaatatttttatccaaatgacgttcgagtgacatttaacaacaataacaactctattattaataataatcgtagtattaatattcctgacagccgaaatatatcgtccacatcaccggaatttataaccacagatatttattccactataggttatactctaccaacaagatggttatctcagcgtaatgatcgtataataatatctaatgatcaattttctaaacttagtattaactcgaattgggaaagacctttaacgattggttctaaagctacagtcagttcattctcttacaacagaaataggttaagaaatacagctataaatatttctggtgataacaataacaataacaataatgattctaataaagaacgtagaaatagatctttgaattctatgtctgactacatcatgacttggtcaaataacactataccagcttctaaggtagcaattttctattatgaaattaaaataatagatgtgagtagtactgaaaatggtaaaaattgtaacattatagttggttttaaatattcaaattatccaaataacaacagcaatagtaataataataatccagcaatgattggttctacaaattttaataataacaacaattgtaatatatatgagcaattaaacccatcttttattgttggtagtaatactcgtagtggtcacacaataagaaatagaaatagagagcgaagaagaagaagaaatagattgagacgaaatcaatcaagtggaagaagaacaagttccacaacaataggatcaaatacaacgcctagtgggataaatataaatcgtgatacctcagtatctggaaacaatcatggtaatgaaaatgatactgacgatgatattaatatgagtgacaataacaacgatgataatgacgataacagtgaggatgatggtaatagtggtagtgattataacgatgatggtgatttggatattaccactactgcacatcatcgcaacaattccaatataagagccagtctagaagcaactaattctttcattatatccaatagcaaacagtttcatggaattgatgacacattctttgggtatcatggatttgatggtaaagctttttcaatattggaaagtgaaacgtttgctaagccatttggtatcaatgatgttatcggttgtggtataaattacattaatggtacaatattctttactaaaaatggtaatttcttaggaacggcttttagtgaattccatgatatcgacttagttccagctattgcactgaaagcgggtaattcaatacaaacaaattttggtttatttgaagaattcacatttgatattttaggataccaaaataaatggaaacaaagagcatacgatcacatctttaattctgtagatgtgaaacatggttatagcataattccagaaagtggttcggatattaatagcgtagatatagatcaaggtgaattactatttttattaggtaaagatagaagaatatctgaaaaagatggatcaatgtataaaattcaacccaattatgttccaattaacaaattgaatccagaagacgaatcaatttctccaactttaaattgtttgattaatggatatttaattcatgagggattaattgatgttgcaaaagggtttttaaaggatctgaaagatgaaatagagacggaaacagagcttgatcaacaatctaaaacattgtgtaatactagtaacaacaataataataattttaatataggaatacagagacaaatcctaaaatataatgaagagcagattttcaaggaagagaagttattacatataaggcaagaactaaaaaaattaataaattcaagtgaaattgataaatgtattgaatatattagaacacagattccaggcttcttagaatttaatatagaggccttatttgagttgaaactagtcaggtttttaataaacatcaaaaagaacagttcaaatgttgagaatttaatacatgaggggcaatcattaatcgaagaatttgtttatcaaaatcatgaaatccttagtaatagtaatattaaaataaataaggaattaaaagaaatatttcaatcaagaatcaattcagctgcatcattattggcatataattcacctttaatagaagctccagaagatttattgatgatgttgtctcgtgaattcattcaggatagattatttttgatgttgaattctaatatattattatatttgaacaaaacagatgagtgtgcattagagaatattgttgggtatacacgtactatgttttctacaatgagacaatatcaccttgaaggtgatcaaagttatagtatagatccagatctaaattttcaaatgccacaggaatatgaatatttaacaaaagagaaaaagaatgaagtaaatacaatggaaaagaatatagaaagtataaagaatagtacatgtttagagacacgatattataaaattatcaatttggatgaagatatactgagtatgaattaaaaagagaaaaaaaatacggggaataaatataaacaaagattatagttaataatatatgtatatatatgtttttgtatgtatgcattataataactaaatatatacaccaaaagaatttgaactaaatatggtggacatacttaggaataaacttcctacgatacttaataaggtatatagaagaaatttaacaaatatatttttctttgagtaagaaataattatagcgaatatgatgaatacaaatgctaataggccagatagaatagcgtattttctttgttcaagtaacggaactatcgattcaatttgaatagtagttagatgatctttctaaggaaaaacaaataaaaacgtggtgaagatttgaaagaaaggaaggcatttcttgcttctattcattgttagtaaacatcagtaaaaaaatgtgcataaataaaaagaaaaatattacatatagcatacagaaaaatatgaatatgtaatgtaaatataattgagaataagtaattaacatacaaataatgtttcataacccatgttgaattaaaactatgcagatataattatagcgtatactatgaaaaagtccaaaacaaaatatcaaaaaaaaagtaaaaaataagagagataaaaaaagattctggaatatcttatgtaatgttataggagtattatatttgctattctcactgattgttgttgctagattatacctaggttatgtaggaaaaagagtacttgttgatatgcgtaactatttaccaaattatttgttgtatacttttgttagtattatcctttgcagaaaagaagataaaaaaatataggtgtataaaaaaaaacacaggagtataagtgagaaggcaagaaaaacgagaaaaatacgacaaaaagaaaaggaaagtaattaactattgcataccctatacgatgtaaccacacctgtttgtcttgttagttgataagaaatatacctaatgaatagagatacgtgtacatagtgttttaaccatgaacaacattttacataaaaccaagattatgcgtcaatggtcatatagatacattagcggtaacagtgttatttatcatcctcctagtttgaaaaatataccgactaaatggaaccagttatctatcccactgaaagaagaaatccaagaatatctagattggcaaatgaccggtgattggagagacatgagtgctaatgagaaacagagtatatactacataagctatggttcatggggcccccgtggtaaccaaattctaaatataaaaaggatatttactaatttcggtaataataataacggcacgcaagtaaatatatcatatctggttattagagggttatttaatttagcacttttttctgctgttggtgtctccatactaaatcttaaaaaagataaacaattaaaggataaggaacaaattgtaatataacctatatatatctggggatacatataacttcttcttattcctcctctgccccatcaccattgctacaaatgaatcatctataactacgatatttcctatattcactgaataaatatattgaatgtgttcaatccaatagtttgttgtcatggcaacatcgttgtaatactctaaatgtcgttttatcgttttacacgaaggcttatttacgttgttttattttgcaaagagtttcttttttttttcctttttttttttgtttgcagctgacagtctgaaagatttcattttgtaaagaaattggtagaagtttcattgaagagataacaaagtatattgcctgctactatatgctattttgtagtatttggaaactatgtcttttttccacaaagtactaaacaattttatatttataaaacattacattttttcaagtgtagcgaacttttaacaagtcaactgaacactacaaatcttcattttctgtttcattttaattattattattaccactataacaagtaatatttgaaactttagtgactcaaaaagcaacaaaaagaatgtctgaattgaaagttcctcacggtcataatccatgggcttctatagccaattctggtcctatctccattttggcatattgtggatcgtctattttaatgactgttacaaacaagttcgttgttaacttgaagaattttaatatgaattttgtcatgttatttgtccaatctttagtctgttgtttaactttagtggttctaaaatttcttggttatgctaaattccgtcctttaaataaaacagatgctaaaaattggtttccaatttctgtgcttttggttttaatgatttacacttcttccaaagctttgcaatttttggccgttccaatctatacaatttttaagaatttgactattattctaattgcttatggtgaagttctttattttggtggttctgtgactccaatggaattaagctctttccttttaatggttttatcctcagttgttgcaacgtggggggaccaacaagccattgctgaaaaggctgctgaaactgtgactgaagaagtgggttcttctgttagtgttttattatttaatccgggttacttctggatgtttacaaattgtatatcttcagctttatttgttttaaccatgagaaagagaattaagttaactaattttaaagattttgataccatgttctacaataatgttttaggtttgccaatcttactgcttgcatctttctgtatcgaagattggtcttctgaaaacttgagtgtcaatttatctagggactccttaactgctatgattatttccggtatggcctctgttggtatctcttactgttctgggtggtgtgtgagagtcacttcttctaccacttattctatggttggtgccttgaataaattaccaattgcgctttctgggttaatcttctttgatgcaccaagaaactttttatctattttctctatcttcctaggtttcttatctggtattgtctatgctgtagctaagcaaaagaaacaagctagtaatagtcgtaactagataaaatttaccttttccttctttctcttccctatatagaaatatatatctgtttccttctgtcttttttttatccctcttttattttcaccagattacagtataattttacttagttaattaagtaattatatacatctttattatatatgttgatatagagttactcaaaaagaaaaaaaaagatgttcgtaaaatcatatgtttcctgttaaatttatctcaaaagtttaggtaataagattgtctatgccatattaatatatattataaatctttgcacgtaccctaacgaataataataataacaataataagtatatgtatatattgtttgcatattgttattatgctagttcagataagatatctggtaagtctgtgatatattgtattacttgtgaaccaggaggactctgacccaagatttcatgcattttacttcccttattttcaactacgtgtatgcaatgtttcatacctaattgaagaccagtagcaatatttgaaccgctatcatcaacaaaccaagcatccttgtaatcatataatccactttgtaattttgccctctcaaaagccattacatcaggtttgcatatcaatgtatcaatttgcttatagtcacaatacgttattccatcgaacaggtcacctaaccctaataatctaataactctcaacgcgtgagttttataggcattagtaaacagccataatttatcaaattttttcgagcgtctcaatttaattaaaatgtttcttagtttaaggttcggttccaagatattttgtaatggtaaagaatcgtcaaccaaagcattgtattctaatgcattcactccatgaaacataactagtcctcgaatggctaatccatattctttgtaatatgtatgatttaatctctttgcttccaacggagacaaatttaatttattttcaaaatatctttcaattgaaatctgcattaaatcatgaatcctagtggaagatttatacaaacagttatcaatatcaaagaaaaagattcttgtcccaggttttggaatcgggtttggatgatcaacagggaaagttatcttagatcctggatgtgttaaggattctaaatggatttgatttaatcttatttgtttagcaacctgctgtctatattcctcttcctctttatatttaatagtcatcctgcatataaaacaagtcaaaaagtaataacgcttgaactttcttttttcttcgtcctctttaactggatttaaagttatggattttaaatctttactagttcatctacatgaagatccagccttctttaataaatatcccttgcttcttccctctataatatatgcataactttgtatattgataatttaatacaggggaaaaaaaaataaaaccctaaaaagggaaaacaaacgttgtcatattttacaaacaaaatgcagaaataaacagaaaagaatgcaaagaaaaaaaaaacaaccacagagtttatgtctttatgagattccatatatatatatatatatttgctagctaatatcaatatgataccttaaagtaaactctctaatcgttgtatttgagattgaattagatgaacaaaactatctttatgatacgaatcaacataattattaataagagcagtggtatttgagtttatatcatcattcttagttctcgaatcattatctatagtaatatgtgctaaacattgttctttcaagatatcaagcaattcattctgtaaagacttcaaagattcatggtcacaattataatctatcaaattgtgaatcatttgaatcacaggctccactagatcataaattttttgtcttctttcattagtcaatccaagtgatattaacttggaattatgtataagtgaattgatatcaaggtatccaaccaaagacaattcttcatttctatctaaaatcatattttgttctatttctccatttgcagttgattttattacatctttcaagttagttaaattctgttgaattttgttctttagatgagttatcaatctttggttgaactctgaagagtcgacaaacttatttatcgtatcattatctttaaatttgccattagcagaaagtactaacattataattttatccataataatatcatttagtcttgataccatatctgaatcccaaggtaatacatctcttgattttatatttatcaaattaaagaaacgtatccattgtaaatgactcaaattaatcatatttgcatttgtaattaagtgtttttgtaaagagacaattttctcgttgattgatttgaaatatttaaaatttggatctacaagggatatatctttatgattgtcttcaatcaacttgtcaaatttttcaaatagagtctcaatcattgaattagaaaatatattatcggtgtaattggtattttcatttatattgttaggaaatgattgagctgctgtagaaatgaatttagatacagataatgaccactgcgagataagcaataacaattctatttcattttggttcttatccttatcatctatgttctttgaattagaatcatatacgttattatctttatctttatcggtatttttatcttttaattgtgaatattgtaaaaactcaggtaatttcttcaactgatatttagcatcatcgaaacaaaactgtctaaatttcgtatcaatgtcctgtaaatcaacgtataaattgtttacattttttgtaatggtcaaaatatcattataatgtaatttcaaattttggtttaataaatcgtcatttttggccaagtcttgcgttacttgtaatagcttatccttcacttgaggaacatgatgctctctaaaatattgtaatactgtattatccatcgttcctttctttttttattgtttttaatgttttttttatctctttcccttcaaaccaatgcagattaataaacaaacgaagaatactgaataaagctaagtgacagtggtggaaatctattcttcaaatagcacgttttccgttatcattgatccacacacatctaatttgtttgtcatctagtttcctttcctttgtatcatccacaactagccgcaattgaacttaaatatagtagatatgtacaagcacacatacacacatatacaatcataatcttttaattttattcttgtgtttctttagaagattagaataaatccctccatccattcttcgagccaacgaaagtttcgacaaatctatacacccacacacccaccaaaatcacgtggactttgtttgtttcttttttttgttttgttttttttttttttttttgaagttttttgaaattttttgcaaaaaaaaaaataaaattcgatgagcttctccaaggaaaagagaaaaatgactacaccgaatcaacatattttaatttagtagtgtagtatatcgcagtatatccataaatacatggccatctgctatactctaacagcatttcttatattacatagatcttttgatatttattaaaatattttctatactgtaactacttagttagtttgcttccttgtttatttgtatttttatttgtctttttattttttcacttctttgttttattgaattcttctttcctttagtaacgttaatatcagcaaagaagtgaactgttccacttgaagtttatcaatagattgaaacatcgataatgccaccaatttctgcatctaaagctaagagagaagccaaaaaagctgaaagagaggctaagaaagctgctgctggtaagacttcttctcgtagaagtaagaaggctagcaaggatgaaccagttgatgaagctgaggccacagctgctgaaatcgaaaaattaaaattacaacaagacgagcatggtatatctgatcgtgttgtcaccggtgtcttggcttcgttagaaacttctcgtgatatcaaattgacttctgtctctttgttattccatggtaaagttctaattcaagactctactttagaattaaactatggtagacgttacggtcttttaggtgaaaatggttgtggtaagtctactttcttgaaagctattgcagctagagaatatccaatcccagaaaacatcgatatttatcttctagatgaaccagctgcaccaaccgaatattctgcattggaatatgttgttagagaagctcaagctgaattgaaaagattagaagatttggtagaaaagattattgttgaggatggtcctgaatcagaattattagaacctttatacgaaagaatcgattctttagacccagacactttcgaaagcagagctgctgttatccttatcggtttaggtttcaattctcaaactatcctaaagaagactaaagatatgtctggtggttggaaaatgcgtgtagctttggccaaagcattatttgttaaaccaactcttttattattggatgatccaactgcccacttagacttagaagcttgtgtttggttagaagaatatttgaagagattcgatagaactttggtccttgtttctcattctcaagatttcttaaatggtgtttgtactaatatgatcgatatgagacaacaacatttgacagcttatggtggtaactatgattcttatgtaaagactagaactgaattggagactaaccaaatgaaacaatacaataaacaacaagaagaaatcgcacatatcaagaaatttattgcttctgctggtacttatgccaacttggtcaaacaagctaaatccagacaaaagattttagataagatggaagctgatggtttaattcaaccagtcgtcccagataaggtcttttctttcagatttccgcctgttgaaagattgcctccaccagttttagcattcgataacatttctttctcctacgatggtaatccagaacataatttatatgaaaatttggatttcggtgttgatatggattcaagaatcgcacttgttggtccaaatggtgttggtaaatctactttgttgaaaattatgactggtgaattaactgctcaatctggtcgtgtgtccagacatactcatgttaaattaggtgtctattcacaacattctcaagatcaattagacttgactaagtctgctttggaattcgttcgtgataaatactccgatatatcacaagattttcaatattggagaggtcagttgggtcgttatggtttaactggtgaagctcaaactgttcaaatgggaacattatctgaaggtcaacgttctcgtgttgtttttgccctgctagccttagaacaacccaatgtcttgttgttggacgaacctactaacggtttagatatcccaactattgattccttagctgaagctattaatgaattcaacggtggtgtagttgttgtctcacacgatttcagattattggataagattgctaaagatatttttgttgttgaaaacaagactgctactagatgggatggtactattttagaatacaagagcaagttagcaaagaatgttgtgttgtaatataacaaatcatttttctgtctatgttatcctttctgttcttgaattctaaaattaatatatatatatattttcctctatatatttttgcttatttattaatttgtatatttaaaatctgtatacattatataatatataatataaagaataacccaaagagaaaagtaaaagcatatggaaacacgattaaaatatacaaataggtaattaattctcttgagtaatatctgtttctcatgaaagacttttttttttattcaagcatatttgtataaaatgaatatatgaaacatatataaatgtatatatttatatatctacgacttttatgaatatatctacttatttatcaggcaacctaaagaataatgcagaaaatatatgaaaaattttttcacaaaaataaaaactaaaacagcaaagaataatcaaaaataatgatactgatagcatgataggatggaaatagaaaatatgtgaatactctcatttaccatttcttaatgatcgaaaaaagtgaaaataaaataaaataaaataaaataaaataggataaaatacaaaacataaaaacatatgcatatgttcatagtttctgttaattcaataatgttcattactttaacaacaaataatacaggatatttcaaaaaagtttttgaataaaaaaaatatggaaaaaaattgaataaattgtctcatactgaattttggacaacttattcaaaaaaaaaagtccttactcattgacaaaaaaatattataatataaaatagacgaatctatcataagctcgaagaagtaattaaaaagaaaaattaatagaaaaaaaaagaagtattcaaatgatacaaaaaggagaaaaaaaaataatagtttcaatttgaaatgaaataaattcataaaaagctaggtttgggcaaattacattcttgtggaatatcagtagcaaaagaggcaccggcaaaagtatgtgaagtttttttagctgtacatttgctatgtttgtttaaaatattattagtaatagtattggtcctggtattgtagcttttttttgaggtctttttaacatcttcatttaatattagttcgggggagataagtacatttttaacattggtattactatctcttgcattcaatagattaggagaattcaatggattttgatgagacaccgatggtggtggcgccataaagggaggtataggtaaagggacattagtaatgctataattcatattattgtttccaaatgggagtggtggaacattattaggtacttggaaagaagtcaatggttgcatgattggagaatgtactataccattcaaaattggtaaaggtggattaccattagcattcatagtggatgtggtgggattagatgtaggtgtaggaacaggagcgggaagagattgtaggggtaaaggagcgatattgttagatgcgtgattaacaacctttgaattattaagtattttgtgattagattgttgttgttgttgagtatttgtattgttggtttgtgtagtttgctgaatagatactaataatggagttttaccaagaatggagttattttctatctttaattggggtggaatagtttcaggagtaataattggagatgttagaaaggtggttaaaggggatggattgttttgtactcgactcatatttttcaaatcagtcacattatttttaagattgtcgccgctctttttcttactgttattattattgttattattattattaatcaaaagattctttaattggttagtaacatcttcagctgattcaatatttgttttatccgctttcttatgtgaatctctcttggtgtttctatttcttttatcaacatctgtttctttatcctttttaaatgattttccaccacttgaagacctttttctggagtgacttttgttttgagttgtagctaaatcattatttttattaatctgattgtggttgtgggaatgaccatgactatgactattgttaccatgatgatggtgattattattattactattattgttgttgctgctgctgttgttgttgttattgttgtgatgatgatgataattattgttgctactattaccaaaatttggtttctgaccattaggtaaaacctgtaattttggtatttctggtaagtttagatccattggagtcggagttgatgacctactctctcgttcagacctcctacccatcatttccaatgattttctattagatttatatcttttcatggagagggggctaggttgaggtaaatgtgatttgtttttgttgtgagcaggcagcattcgtgacctattgaaatacattgtgtctgacgacattacagcaatatttatttatttatttattatttttttgatagttttgaagttctgaattaaatcaaagataaattatggtttaattgtatcaaagttatcctgtgacaactgtcttttggagtgctaattaaaattagttttcgagtatcgatttaaatttatttaaaagagtaacaaagattgaagttacgatttgagttataaaagaagaaaaaaaaaaaaaaagactcgtctttgttttcaatatgtgtttataataaattaaacttatcatcttctttgcgtagtgcaaaaaaagggagaatgctcaacaattactttctttccttctttatttttttctttcttgttcttccttttcctgtttgaagttcgaatgccactaacacaacatcaaagaggggcaaaaaacgaaaaaacgaaaaaaaagacagaaagaaattcaacaaattattctttctgtcgtttctttttggccgttactgcataagacagtatattctcagctggggtatgggtgttcacatattgaaccctaggttatagaaaaaaaaaagggggaggaagagtaaaaataaaaaggaaaaatcccttgtgtgggcagagataagatagggttgatctacaagaattgttgtttttatttgaggagctgactactagtgtagggttctatttgaaaattaaaaaaaactatacaaacaaagtaaaaaaacaactattaaagtgataagtaccaaagacatctgccttatacagttctcaatggatcttgatctgcctcactgataatacattcaaatccctcactggctaatttaccagcaagaacatcttttaggtagccacgttctgtatttgaatgattgcatacaatacacgtcttgcccatctctttaatcttcaataattcatgatgtgacatttctcctgtataaaacacatcaatatccttccaatcaggtatggatttaaacacactactaccactaccggcgcataatgctatctttttcacataattatggtgtgatggatcgccaaatggagacgctatctgtaaatctttgatgcccaaggattgtttaatattatcaatcagagtgcttagattaagcgggtcctttaaagtgacaattctgccgtatccaacagattcatcctgtggcaacgatgccactttttcaatggagacaattttatctatcaaagtaaactcgtttttcactaaccctaatgccatccaatcgtttattccacctttagccgcatccatggctgtatgtggagaataaacagagatgaaattttgaattaactgaatagctgatttatgttgtgtattcctaacaggatctaaaaacttccatgaagggaaaatgaatggatggtacgcaataaccaaattgcaatcattgtcaacagcttcctgggctaccgcgttagtcaaatcgacagtaagcaaaatctttggtttcactgctggtcttaagttgtcatctgcaacagaacaattgattagtagacccgtattatcccaggctttgtctgcaaaattctcagggtaatgtgatacaaaagtctttaaaatactgtttaattgagttcttgttaatgctcgtgaggccattctttatgaacaattgtaagcagatagctactttgacctagttcattaatatatatatacgtgtgtgcatgtgagtgcaagtatttgcaagacacaaaattctcgagaatgttatatgaacgatttcatccgattctttttataaatcatctaactatttttctatatttcctccccgctgatatttccttttgttttttttttctgtttaccctttaaagaaaaatattcctttctcaaaaaaacaaaacagaaaaaaaaaaataaaacgaatcgagtgaaatagacatttaaagggttggaaaacagtaaaatcgctatattgatatttttaatgtgtaggtaacatgtatgtataaagatactacgtgtattagcagttattactgctttttaattaaatttttcccaattgggcaagctatttgatttaaagatttgttatttgtctttggttttttgatttttttttttttgttttggttcgagaaattagcattagtttgtatttcgtttaataattttgttttcattcttttaacaacagagtttgattaagatatgttttctcgaggatttattagaaaattggccacatccacaaagtctactcctaaaataacagatattttaatcgttggtggtggtccagcaggcttgacattagccacagggatccaagaatcccctatcttatccaaatataatgttactttagtagatgggaacgacctgctaaataaagtgggtgatttttactacgaccctccaagttatttcactaatagagtagtctctgtgacgccacaatctatgaaattcctcactgaaaagttaaaagttgctttacttcaagataggattcaaccatatgatggattatatgtaaacgatggtattacagatgcctttttggagattgaaagagaagaaatgctttatatgattgagattttaaatatacaatcttctttgttgcacaagttgactaccaattcaattaattcaagagtcaatatttttgataattgcaaagtgaaatcaataacctctagtgtcaaaggagatccaacgtcatggcctctggtagagttggctaatggtgagatttataaaactagactcttggttggtgccgacggttttaattcaccagtaaggaactttgctggtttatattctcgtggatggaaatatgatacatgggggttggtagcaactttaaaattagatccccaatctttacctatttataagttgcgtggttggcaaaggttcttaccaacaggccccttagctcatttacctttgcccggagataatgcttcgatggtttggtccactggtggaaacgaaatgtcatcgatattaatggagatggattctaaattattcgctaaaatggttaacgctggattcattttgacaacaactgatattcagtactatttagctgcatttaaaaaaggaacattaacaactgaacagataattgaagatattgatgatagaatcaatcaagtatacagttcgtttaaagatgaaactcaaatcgatgaaaaattcccacccttagtggttgacgtagtaccaggaacacgggcccgtttcccattaaaatttagccacgctgattcctatgtaactgatcgtgttgcacttgttggagacgctgcacataccacacatccgttggttggtcaaggtttaaatatgggacaacatgacatagaacaattactaaactgtttggaaagagccacattgcgtgggcaagatattggttctgctttaagtttggaaccatactgggctaatagctatggttttaataatattaggttagggatggcagataaattacataaattgtatcacactgatttcacacctgtcgttgcaatgagatctttaggtttaaatatcgtgaatcaacttaatcctgtgaaaaaccttattgcagatataatgacaggtagataaacgaacaaacgttatatatatatatatatatatatatatatatattcatatgtacggtttggtacaatgttttatgtaaatacatgtatatttgagtatggtattcagttttcgattttgttgtattttgctaattataattcacttattcatattgtatctttgctaattattgcagtatctgaaatgtctataacttggtaagttagttaaaatctgaggttaatgttacatctaaccctatttgtgggcagaattatgtcggtaaaataaagatgattattaatcgggtaagataaaatttagagtcatacaaattgaacaatttaaaaattctgatcaattgatttaatttaagaatcccgagaaattctggaaaaattacagtagctaaaaatttcgctaatatcagacaaaaatatacataggttcttgataacaaattagtagttctcaaagaaaggtctttccagactacaaataatcagtattttaataaacttggaagtgcagttttaataatttaattaaatgataatatttttttttaaaaaatatatatatatatataaataagggtttaaggtttattgatttcacttttcatatccactattggaaagagttcaacaaataaagcaagatcaaaaagaaatgtacactgaaacagatttacgtcaacagatcgagactacaattccaaacgtgtataattgtattgtgacggatttatcttatggttgtggtcaatcatttgatgtagtagtagtaagtaatgaattcattgggaaaaataaattacaaagatccaggttagttaataatgctttacgagaagaattaaagcagattcatgcctttagttgtaaatgctattcagaagaagaatggtctaagattgtcatttgatataatcttaaactgtacaaaatataataactgaactgttgtcattaaaacataacattaagaatatatatgtttctttgtatgacttgcacgccagattctatgtaagatatatagatttataataataataataataataatggccatattttatttataattgatattattagtactaaaaacgaagaaggaaaaaaaaaagagcattattgtattatttttatgttaataattacaatgctatgagtaaattattcatacaaaccaaataaatgctaatataaaaagaaatgtagatatatgaatatacagaaaagacattagtaaatgtgcaaaaacaagttagtaacaggaataacagtgataatgatacagccaggaattaataactataaggtggtggtgatactgttggtgtatgcgtgttaatgacagaatgtgccgataaccttctagtaggagatattgttatatcatttgtactaatgataatagaattgtttatattattattgtagccccataatgaattgtaagaatttagacctacaaacccaatagatttagagattgttggagaggaaagtgaactatctgatggcttcccagaatttgtcccattatttacagtattggttaatagagaatctacgaatttattcatttcctttgtctcggacaataattttgattcaaagaacttttcttgattattttctctggtatatatagtggatttggaaccagcagtaacatttattttttcttttgtctcttctttcaatttcttgtttttctttgattttaacaacttatttaatcttattactctatttcttggttggacattactattagtatcattatttatatgattggaattatgataatttctttcgtacaatttattttgaatattaatgatatcatttaattcgaaatttcctgtatccaaaacatcctgtggtaaataattctccttttcattatttgtagtgcatctaattttattacctttaatgtgatgtgactctgtaacacgatagccaatagaattcgatcgagtagcattggtctcattagtattcgcaataaaattccttttattgtttgacttactgccatgatagaaattctgtagtgatggcatggcggaaataaatctatataaattctgtctttctaaacaaccgttaaaatttataaaattatttggatatgaattagatatgagtgggttagtaccatgtagagataatgtataccttgactttataattgatgctaatttagacatattttctatcgatatttcttgcaaatcattttcatccaatactattttgttaatctctgtcagtatttcatctttacttttattattattgctattgctattattattactagagttggtattattttgattgaatttatttggatttaaccaatgttgtgatgtattaaaaattgctgttggtagaacttctttgaatattgagtaaatggaatttttcaattttttctctattgtgttctgtaagattttgattgaacaatcaaatttaaaatctaaagaaacgtcattaaaggatatggatatgccatgatttctcataaatacgttagtgatagcttctaatttgatcctagaaaaagtcatggtgattgggactttaaaagaattattatcgattaatcgtggggtgatgaaactaggcgacatttgtaaagtggtcattaacagattagattcgataacagtttctaattggataaaggcattgcagcaggatatattgcctatggctttaattaaagaccttggctctgtagttatatccatatcaagaatttcaacttgcggtatcattgggaaatcaactttagtgatttttatttcatcttttaaaaaatttgatattttattggaattactcaaacttttattaacagaatttgtgcctgtagagatgattgtggaagagttacgaaccttactggtcttaaacaatccagcgttattattcaaggtagtgaaattactatatttatcagtagatgaccttataacattattggccgtagtagcggtagtgacagcactggtactactaccgatactgttactattattcaatgaacttgtaacatcataataaatagaatttgatttgggaatatcatctttgactaaagatttagttaataaattagttaatttttgtttaattttttcattaaaatcttcatctttaaataaattttcattaaatttaaaggacatttggttggtgaccttatttttttttttttttgaaaataattatttaatttatttatgtacttgtttattccttataagaaggaaacggactatcataaagatcagaaaattgtgtgtaatatactattgcaaaaaaagaaagaaaaaggaagattaaaaaatcagaataaataaataaattagaataaaatcaatagatcttacgcaccactcgtcaatgaatatctaattttttcaggacaataaaactaaaccttcgatcttgtatgcatctttaaagcaatgaagttagcgaatagaattgaaaattgtttatttttaaactctttacttgttttaatattatttttgatattttttttgtttttaagaattttatcttttgaattagattctaaaaaaaaaaatcccctcagttttattttctgtcggaattgcagaattatacttccgtgattggtggaatataaaacccgtgcctacggataaaacctaacaagaaaaaaaaagggacagctgaaccggtatattctgggaaataacattccgccttacctgacaatagccaatgaacgaagaaaacgacaaaagaaagatgcaagcccattgttattgttccagaggattcctaatccgcctcctgcggaattcataggcattgcgttgcgacgtttttttttatgtttcgtcaatttttcattataattggtttgtccaacacatatggcaagagcaagcgatatccattcaagcagttacatgtatgtggtgcattgtagtacaagtaaaaatattatcttagatggtgtagagaagttttatattcgtactaataatagtcaattttgaattactgttgcattcatatatagggcatttctttctatcgttctctctttcttatcttcgattcttaagaatattttaaacataccggatataagcaaaacaaaaaaaatgaaaagggaaaaaaaaaaggcgagggatcgattccttctggatcttcaataattagaataatatttttttgattttgatttttatttttatttttatttttattttttttttttcgtttttgatttatacctatctggaataaaaaaaaaagaaaagaaaagaaaatccgcacatcgaaaatagatcagtatgaaaactgtaatttactaaagtaaatttgaaatgatctaaacaactgtatttttaactttcgaataaaaaaaagaacattcgtaattaaacagttgaatactcaaaaaaaaaaggtcgataatcgttattatttcccctctcataggtttatctttttttctctcttttttttttgttattttcgatcataatgcataatgaaggggtctaaagctgttgaaggtttaaatagacaatcttcaattacagtagctgtaagaattagaccatttaatcaatgggagatatcgcatcttattccagaagaaagaagtatatatgcaaatggtaatagtactttcaaaaatgaaaatgataatgatagtcgtgtgatattaaaccaaaattctctttcttcaccactgcctatattaccacaaagaggtgtatcgtcatcttcctcttctctttcttcttctggtaatttatataacgaccttccgcgtccgaatggaatatggtctttggttaattgcgttgatgataaaatgcttatatttaacccgaataatagaaatgttaataataatattaataatattaataatatcaataatagtatcaacaacagtggtaaaaacaataatacagcattaaaatataaaagaaaccataccggttggagacaacgtagtactagtaattctagatataatagcaatagtaatgataatggtaatggtaatagtggtggcaataatgaaactaaatttatatttgataaattgtttgatatgagaaccgaacaagaaaccatttataatagtctaatggtccctttattagattctgtaatggatggatacaatggtaccatttttgcatacggtgccacaggttgtgggaaaacatacactattaatggtacagcagatgatccagggataatatatcgtacaatgaacgatctttttaaaaggatcaaaaatttgcaaaatgagaaggatttcgagattttgttgtcctttctagagatttacaacgaaaacataagagatttattggaccccgatactcctagtcataaacttgtcatcagagaggattcgaaccaaaaaatccttgtgtctaatctatcttatcattcgccaaggaacgtggaggatgtgttaagtttagttgaacgtggtaacaaaaatagaaccacatgtcccactggagctaatcttgtgtcgtctagatcgcactcaatcctacagatacagattgtacagaatgataagatgattgatttgactaatgtgcaaagttttggtacgttatcgataatagatttagccggtagtgagcgggcagcggctactaaaaatagaggacagaggctgtttgaaggtgccaagataaatcaatctttattagcattgggtaattgtattaatgcgttatgttcggatacaaagaaacagcatgttccatatagagattccaaattgacgagattattaaaattttcacttggtggaaattgtaagacggtgatgatagtttgtatatcaccaagcagccagcattacgaagagactttaaatacattaaaatatgcaaaccgggccaaacagattaagactaagatgattaaaaaccagcaaaatttaaatagacatataagttcatatttaaagatcattaatgaacagaaaaaagttataaggaatttacaaaatagagaatatgtaattgaaaagaggatatatgacgcaaataatgagatttatgatatgatacaagtgataaaaaaagacataatactagctactaataatgacaataataataataatggtaacatgaatataataaattctttaatattagttaaacgaagacttttacaatttattaaattaaaagtgagtaacgataaccgcaataatggtaacaattttcttgatgaaaatattaaaagattagaacagcaatttaacagtaatgagaaacagattaatgaaaggatcagatttatatcggatcagtatttactaaaattcaaacaacatatcaatacaagatactgtgagcaaaatcagaatcaaagagaagagtcgttgaattattatattaagatgtataataatgaggtaaatgaaataatgagtaattataacaaaaatgttttaataggagcaacagatattatggaggaattaatgaatggcattagtgatatcaatgaagaaaatgatatattatcaatcatcaaggcaggcaatatctttgataatgataatacaagtgatgaagtaaatgaggaattaataataaaagaattcgacaaaaaatttgatagatttgcattgaaatatttaagcaaagatgatcatgatcatacaactactataaaaatgaataccactactaacaataatgctaataataatattctaataccatcatatacagaagatatcagtttacaagatataactatgattagagaatgatggatttgaagttacaaccatcatttaataggaatagcaataaaaaaatcatgataataattacataatataatatatactacaaaatataagggtatatttatagatatgtagaaaattgaaattgcattggtttttctggagtgtattaagttagtactagaaggaatacgttagtgaggccatacaatgttgtatgattttattttattaacttttcataccaatgatccatataaaatttaattaaactactagaagttgtcgtgagggatacgtattggttttcgttgggtttgaatatcttcgaagattgctcgtaacataaaaaagaaacattgtcaaacttaataaagtgaaagagaatcagttggagttctagatttttacagcgtgttgttatgaataaaacttataaggcccctttcttgtttcttctttttattttcatccttttctatttaaattttatttactccttcagatatttttcatcattgttcattgctgctattatttatttatttatttatttttttgttattactttaaattaaggatattcgattaaatgatggtgatatgtacatatatcactatatacgactgcaaccccggaaaaaataaaaataaaaataaaattaataataaaatattagaatccagccattttttcctgttgtattgaaagtagtgtatgggtgttatataattatttctgtattgagtagataaataaaacagagacaattatcggattaccttctattgtatggtgatagcgctaaaatccgccggtatttcttaaaccagaaatgtgcaagaaaggaagaaaggaaaaaagaaaaaagaaaaaagaaaaaagaaaagctcctcaaattcagttgtatttgattttattcctcaacaatgttcgtttgtgttttttcattaacacggtaaaaggaaataaaaataaataaataaataaataaataaataaaagaaagaataattgattaattgattaatagaagaaacaacaataacaaaaagaaaaaagaaaagaaaaagaaaagaaaaaaaaagatatttttatgttcattcttttttcttttctttttttttgcaaattttttatgcttttgtagctctatggggtgtctggatgtgtagttagcattatcgctgttgtttggtgttgctgctattattcattctattattcttgcaatcgaccaatttcatttgtctctttgttgtgtcttgggttctattgtttctcaatgctctaacaaatggaaacaatgaacaacaaatgagttcatggaaataaatcataatgggtgaagtgtcgttagtaagagagaagagcgaaaaagaataaatttaatagtgctagtactaatgctagtatcattattacgattactattactagtagtagaatggggggggaaggaacagagagggcaggtggtccaaatgttcgtcatttgtaacaaaaagaaagaaaaagaaaaaaacatgaaaaataaaaaagtaaatggttaaaagtggtgttcggaattgggttcaatgtcttttttacagcattagagtttggttacttcaaagcaaagaacgagatacttttccatattattattgtcattgtcgccatcatcgtcatcgtggttattattgtaattcttgttattattatctatattactattattattgttattattattattattagctcatgttttgcttgtttctataaaaaacggccgggtaggaaacactatgtacaacatttgaagaattttatatatataatatatattctcagccttctcttctatatataatgtcttgatccaattagtagttgttgtgactatattagtagcctgggacgagcagtagtggtcataataataataataataataataattatatccgattactgttactagtagtactggagaagcattaccattatagttatatggatagttttgatatgttttaaaagatacacaatattactaatattatacatacatacatacatacacagatacacgtatatcaacaggaatttgacctactttgtgttttgattctttttttttttttgttttcctttttctattttattaattgttgttattacatttatcactaaataattcataatgttacaatatcaatggaataataattttgctggtttgccttctaactctaattctaataatatatttgataatattccttctaataataataataataataataataataataataaggttaatggtggtgtatcacaaattttagattatgatattcaaataatgtctgatttcattataaaatgtagtttaatagcatttaataatccttcaatatacagttatgaaatagataataacaacaatgataataatattaataatattaataatgacatgataaattacttaaataaactcaaatcagtattagatgcaacaagactgcctaagattacaatatttcagagtttagacatcttattcaaatatataaataaaattgacttattggaagataacttaaaaatgatttcaatcaattcgatttatcaacacattataatatcctttattctagccaataaatttaatgacgataaaacttttacaaataaatcgtggtcgcacgctactgggatccccatagccaatctgaacgactgggaaagaaattggttgtccgtattgaattggagactctttgatgataaatttgcatcctatgatattttattaaattcttatgaaaattttattagagaaaaacaaactaataacaacaataatattaacaattatagtagtagtaataataataatagttacaatagtactattactaataataataataataataataatgactttttcctattttcttcacctttacaatccccatctattatcaaagatacagattttactaacaggaatggtggtttcaattatgattattatattttcggtcaaggatcattaccgcaattatcaccatctctttctttacctcaacaactaccacagcctataaacaatgtggtattgcctaattcgaatgattaccaatattattctacaataccattatcgctgccctaccaacatgttataccacaacaacaaaactatatgtcaagttcagtaccattacaacaatgttttataccgcattcatcggtagtacctcaacaacaacaacaaaattaccaagtagacccgatgtattctttttcaggagcttacaacaacaataacagcaatagtgacaatatttgtaatacgaacctcaataacaatatttattggaaccaaaatgttaatgcatttaatgctgctattcccactgttgtaaataataacactaatactaatatgaatagtttttattatccagactttaaaagttttaatatgataaacccaattaataatataaattacaatatagtgtattgaattttggtaactgcattactcatattcaagattttttttttgtatctttgtggattaatttttaaattttgtacatgggccttatttgttagcttaatgctacagttttcaattaatatctctatgatttataagtgttttttttgttttagtttttttttctttattggtatttttcctcacatgttacacattacattaatcataatttagttggtcccttctcatcgacaatttatattagcaattaggtgctgctaactaccattaatgatatatatacatagataaattatacatatatctctatatacatcaaattaaatgtagtttttttttttccttttcctaaaagaattttttcttttgttcttctttatttacctgcttctctaaaccatcttatacttctatccatacagacacaacataatccctcattactttcgttttccatcgacctattgttggaacaaattcccttggcaaaatacttaacatcaaaaatgggtggttgattcaaagaatcaccttgttcatcttccaacatgatatcttcttctatttcaatgtcgttggcgctaatatttaatgtggctactctttcctttgtctttatatcccatattctgattttggcatcgtacccacatgtagccaaatattctccactaggattaaaacacaaattgaatacccatccattatgtgcgaatgttccaatgctacctttctttggaccacctgtagaaccagtgttaccagtagatcccccactggacagggattctatacctaagggaacagttagggatccaacacgttctccaaactctgtttcatataaagtgacacatccaaaggatccacaatcgttacctacagcgagtaacgtcccaccgggactaaattgcaaagttcttacagaattactacttgttgaatctataccttgaataccaaatccttcaaatgtgtaaagtggtcttaaggtggccaattgtgaaacgatgactgtgccattagcaaaccctgtagcgatcaaacctcttttcgctgagacatcaacgcacattgcaacgacaggtttattggatgggatgataccttgtggaatcaattttaactctaaattgttggtgtcggggtttttaatttggaatttccagacatacgtgttacctttaatgtcacatgaaacaaatctatgagagacaactaggtcatcacttttaatccatttaattgaccagtatgacttttttaattcatcggttgttaacatcgagtcaagtaggatcagttgacgagtctcattgtcatattgatagaagtaaattgtgccactaaatgataccgtagcaataataagaatggttccgatatcattgttttcaacactatagaatgcatctacatgatgtaagccactgccatctacaaactgtgctacatcaggtttgacacgcaatagactcatagatatattaccactatcaaaatcttcagagttctcggaggtagtcttcgcaggctgagagtttgaccatagttttaatgtaccatcaccactacatgtaattgtaaatggtgaagtaacacagatagaataaatatcagcatcatgtgctttaccgatgtttgtggttggaatatatactttggacattgttgcaaaaaaatatttgtcttcttctcctttccttttaactgtctataatagttctatagagtctccgttatgaatattgaagttgggtagtaagtagaaacacattcgagaaaacagggtaacaatatatatatatatatgtatatacataatatattcttatttgtgtataattggtctattataatgactttcgtacaaagcaaaactcaaaatttcaattattttcaatttcaaaaatgaatccattggcaacattttcctcctagatgtaacataattattaataaagaagaccactagataaagactagtaaaaggcgtaataatttgtttatttaactattagagagatgcattgtggtcctgttccatagtccaatgaaaggatacgcacacacacacacacatatatatatatatatatatgtatgtaattataagataataatcttaatttggtagaaagatgaataatgttatagaagtgaaaatagatgttacaaatgtaaaatgggtagataattcttatattcaatatcaattccacgtcagagtggttgttggtactgattataataatataaaatgggagacaatacttaataaacgatattcagattttgttaaattagaaaaggacatgttaagtgaactaaaaaccaagaaatgtccatttgatttaccgaagaaaaaatattctatatggggtaagtactatcccttcagtaataatgattcgacaaatgatacagctgatcatgatggtattgaaaaatatgatgatgatgagacaataagggaaagaaaatcgaaattggctaaatatttatacgacattttaaataatacgtttgataggaaatggagagattctaaatcaatggcaaagttccttgggttaaaagacggtatatctgattggtcagcattacttaatggattgagaagtggcacaaataagaatgaatatggggctgattttagttcaaataatgaagattcatggttaatccaatttagagattgtaaaaacgacttattacaatgtcgtaacttatcccagtacagaaatcacagcggtgataccagtagcgacaccaatggcacatttcttaacagtttaatgaaactacggttaaaagttaataatttacaaacagatttatcacaaagtagtaataaggggaagaatattgatcaagatgagttagtaagaaggcagaatttactgaaaatgttaaaacatgatattactgaattatcgtccaattcttctattaaaccaagttttgaaagaaatacaacaaatctaatgaaacccattagtaatggtaatagaagacgatttggagaaacctcagagactgaaaagttgaatgatagagaattatatacgaataatagaattgtattacagaaacaaaatcagaacttagaacagttgcatgatataattcaaaagcaaaaggtgctatcattagctatgaatgaggaattgcaacaacagaatgaattattagatgatttttcaaatgatgtagatagagtatatggtaagattaggaatactaatgagaaggcatccaaagttaatcgttgaggagttgtttggaaaaggaaagagatcaaaagggaaactgaacagagagaaacaccattgagagtcagaaaaaggaatgataaatgtacatctttgatctattgcagtatgttattagtaatcttttttttttgtttgctctgtcgaattcaccaaatttaacaaaattagttaaagagaatgaaaaaaagaaaaaacagaaaaagaaaaacagaaaataaaaaattttttttctatattttattttaaacctttaccgatcaattctctgtagtcgaataaaaaagaaggagttaggtgtggcatcacactatataagcaaatatactgatttctctcttctctctactcacagtttgacagtacacttatatcaagcatgtcttggaccgctccgattgatccggttaataaaaaacctttaaaagtgtcacaattatgtgaaatatgccattgtcgtaaagcgatcatcaaaaggccaaaaaacttgcaaaaaatatgtaaagaatgtttcttctatgtgtttgaaacggagattcacaatactattgtcaataacaagctattttataaaggggagagagttgctgttggtgcttctggtggtaaggattccacagttctttgttatattatgaagttattgaatgaacgacacaactatggtattgatatccagcttttaagtattgatgaagggattgtgggatatcgtgatgactcactggctacagtgaaaagaaatcaaaaacaatatggacttccattggaaattgtttcatataaggaattgtataattggactatggatgaaatagtggcagtggcagggatcagaaatagttgtacatattgtggtgtttttagaagacaagctttagatcgtggtgcacaacggttaggcataaaccatattgttacaggtcataatgcagatgacatggcagaaactgttttaatgaatatacttcgtggggatgttgcaagacttgagaaatctacatctattattaccagtagcagcgggtctccaattaaaagatccaaaccatttaaatatacgtatcagaaggagattgttctttatgcacactataagaagttagattatttttctacagaatgtacatatgcaccagaagcatttagaggcacagcaagggagttaatgaagaacttagaaggtattagacccagctgtatcattgacatcattcatagtggcgaaaatttggtcttaaaggagaaaaagaaaagaatagtgtcaaatcaatctgaacaacaagcgaagaaacaattcgcggatggtaatagatgtgaacgttgtaactatctttcaagcaataaaatctgtaaaggttgcattttattggaaggtttggaaaagagccgagcaagcgtctcaattgaatgtgattcagcgaatgatggtgctgcaaggactttaagaacattagagagattatcattttgatataaatatatatgtatatatatatatatatatataaatgtaagtgcagacacaaatacagatgaatcatgcctgtgtatgtgtatgcagtacgtatttgttatgtttcagttaccactgccgtatcatttcctcgactttattactgtttacttttgtctgtttgtctgtctgtttgtttctttttggcagttagtgggtcaatatcacaaagtacgaagagaagtgtcctctgtcttttctcgtatttttctttttacgttgttatatcacaacacacgaattccattgtcctcaaatgagaaaaaaaatcaaagaaagaaatttactgttgaaaaaataaaccaaaacaaacgaagaaattagtgacaactggcacgatgaatcgttaaaatacatatagatatattcaaattcactacactatcattgtcaaaccgtttagttttgttgttgacgtgattagtgcctatctgaaagaaagagaaaaagtgttgggtttaacattaatagaagaataattgtcaggaaattgatcagatagggtagaatatattgaagataataattaatagataactgtataaataaattaattggtcacccacacgcatatacatatacatagacacagacacataaaaaaaaataaaaaagatttaaatttagcaaaatttggaaatgagtaatgaggattatggatatgattatgattatttatttaaaattgtcctgattggtgattcaggggtaggcaaatcaaacctgttatctcgttttacaacagatgagtttaatattgaatctaaatctacaattggtgtagagtttgctactcgaaccattgaagttgaaggtaaaaagattaaagcacaaatttgggacactgcaggtcaagaaagataccgtgccatcacgtcagcatattatcgtggtgcagtaggtgccttgattgtctacgatataagtaaatcttcaagttatgaaaattgcaatcactggttgaccgaacttagagaaaatgcagatgataatgttgcagtaggattgattggtaataaatccgacttggctcatttacgagctgttccaacagatgaagccaagaattttgctagcgaaaatcagttattatttacagagacaagtgccttgaatagtgaaaatgttgatttggcctttagggaattgattacagccatatatcaaatggttagtaaacatcaagtagatcttggtaatgataataatgcatctggtaatggtaacgctggacctcgtggacctactatcagtttgacgccaacaccgaatgaaaagaaaaagggcagttccaataactgttgttaattcaaatatgtaattgtttttctttttttttttgtttgtctgtcatttatttttttaattttccctttctttttttttcttttctttctttcttattttgctgtttttgttggattgattgattatattaataatgatcggatgcattgaaagtatattactaattatatacgcaggtgtatgtgtatatacttttcctttatatatgtatatgtaaaaaaaaataacctatttaaatgactttaaaaaataataaaacttgtaaacaacagtgtcgattggaaaaataaaaggaaaaaacaaggaataaaaaaaaggaaataagtcaaaagttaagatgtttttaataagcattatcatgagtacattgacactaaataataataataatagtagtaatgataataagacagagtgaaaaacattctaattagagagacttttaaaaaaaaaaataggtttggcttctggtgatgttaggaaaaacaagattatccattgttactcatttcaagatgttattttagttttgaatgtccatatatatatatatatatcaactacttcaaataatattgaatagatgcatggacatgtcaacctgctatgtaatagaataatgttttacagcttaatgccgtgactctatgttagatataatttcaaacatagtttgaaaatacagtatagatactctttttataaaggtaattaataccagatagtcggttcttacaacttttgattacgtgcctcttatagtatactaaacaattatagcaaccgagagtaattttccttctattacgtattgttgaaatccaggtattacttttttttgaacgaatcacatttttagccgaaacgattgccaatcagtcgtaagttacatgtatatcggaaactcgtcactatttagattctttttttggttctctttttcctaacacttctgaaaatctggggtaaattcctcaattatttatgtgggggggagacaccgaacggaacggaaaaacagataataccatttcggaaaaacttttctcaagaaaatttaaacatttttccaaaaaaattgggcaagtctttttttgtgctttccgaaaatagaaaacaacaacaatactgcgggaatatggggaagtctggaaaaactctataaagtttttccgtgagatttaacagtccttaaatattattttcccccatacaattattgtttattccaactaatttttccgttgattttattgttctctattcccatttattgtttttccctcctgctgcgtcactttcaaactaagattatcgttcttttctttttttctttttttattttatcaatctatctaagattggatgtttctttatatgcataaatacatatatacatttcttttgctttcactctctttctccctctctttatatatatatatatatctagaatatgggtgagtgaggggggagagagtaaaacaacatcaaataaaaaataatagttatataagtattttgttgcttcagagtgttaagatgtcagaaagttggaccttataaactttaatatatcttgtttaacttcttttttgtctctactaaactctgttaagtatccaataataaatttagataagcaataaattattactatgccgagaaaggaattacagttcccagaagataatgaccaacgtccgtataaatgtgaggtgtgttctcgagggtttcatagactggaacataaaaagagacatatgagaacacatactggtgaaaaaccacataaatgtctttttccgggttgtagtaaaaattttagtagatcagatgaattgaaaagacatttgaaaacacatacaggttattcaaataaaagaaataacaacagtacagcaagtataaaaggtttcacaggtagccatgaaaatatgatggatccttataatcaaaatcaaatggttaatctttattctatggattcaaatatgtcttttgtagtctctccgcaaccagtgccagtggtgatgcctgttcctattccaataagcataccatatcctcagcaacagcaacaacagcaacaactattactacaacagcaacagcaacagcaacagccaatccagttttccccacaaaacgttatacctcatgcaacatcctattcaccaatccctgtaaccaatcaaaattatcctcaattatcagcatccgttcagaatttatcgtcttcacaattcgtatctcaacaattaatgactcagcataatatgggtgttaactctggtttgcctataacacagtcccaaggtcaattaaacacttttccaaatctatcaagctcattggatatgagtgatcagtcttctattttttcaaatcaaccaaatataatgcaaccaaatgcaaattttctggaacaatatggtaaaaattcaacaacatctttactgtcgacctcaccttcttcacttaatgagtccacgattgaattacagagcaataacgatattttaccaagtgcatcctcacctaataaacattctttcaagaaaacttttcaaaatgctataagttcattacgagttataatacattcaagaccaagatcaccaccatcttctataaataaaattataaaaccatccacacccgctgaatccatcttgtctaccacaagcagtttagcttctttgaacacattacttaaaaaagaacaatttatgcaaagagatactcagctttctggtaattttaataactataataataataatggtaacgaaaattgcaaacctttttttagtccatacgaacaaaaaaaaagttcagaatcacctagaataaggaaacctactttttatatagttgatgatgacacagataaacaaaaagatgatattataaagttaccaaaaagtggtgttaattcagattcacataatactattcattacgttgatgacgaaaatggagacaaattcaaggtcaaattaccaccaatgagtaatatccttaaacaaatcgacatttttaatacaaattcagcctaaagcattccttttatttgtatttatttgtatttatttgtatttatttttacagcattttattctgatactttcctcatttatgcatacactttatgatgatagatttttcattttgagacttatatagatatatcaaataattttatatattgcattatattttattagttttaaagacagttaatacataattatgtgacgatgactacaagtacatttgggttttagtatatcagatgtctttctgaatatgtagtgtatttcatctatttgaagtattaaattgcttaagttaccctcacggatcagaaattattgtaacgagtccttctttctttttttttttttttattattgttctttcgtttttactttttctttttttttttctaataaaattttctctgaatatatctcccgaataataattacaaggtgatatatcttagaagtggggcatagtataagaaagctttgatagggcagaggtaaagtaagttgctctatttgttcttcgtgaagactatctatatcggataccagagtgtgtctgtactatactttgcaacatattaaaacttgatagaaagatggaagaattgaatattgattttaatttactcaagaaaagggctactgctttgcataaggcatatcctacattcgatgataatccaaattctcttttattcgtgataggttcctctaatgcggaaaatccatatcaaaaaactacaattctacatgattggattattgggtatgaatttcctgctactttaattgcttttgttccgaataaaattgttattatcacctcggcagctaaagccaaacatttgaataaagcagtaactgtttttaaagaagatacatcatctaatattgcacttgaaatttggcaaagaaataataaagaacctgaacataataaaacgctatttaaaaatgttattcatttgttaaaaagtgcaggtgataaaattggtatacctcagaaggattcatttcaaggtaagtttatgaatgagtggaatccattatgggaagatgcagttaaaactaatgatttcaagatcgtcgatatatctttaggattgtctcgtatttgggaggtgaaagatgaagcagaacaagctttgattgctgtggcttcaaaggggtcagataaattcattactttaatgtctgatgaaatggttagagcagtagatgaagaattaaaaattacaaattctaaattgtctgataaagttgaagcaaaaattgatgatcttaaatttttgaaaaaaattagttctgatttgtctagcctatgtcctccaggtcataaatttaatattgatttaattgattggagttattcccccattttacaatctggtaagaagttcgatttaagagtatcagcacgttcaaatgatgatcaattgtacggaactggttgtatattagcctcatgtggtatacgttacaataattattgttccaatgtaactagaactttcttaatagatccatcagaagaagttgtcaggaattatgatttcatgttagagttacaaaaagagattttacaaaatcatttgaaagtagggaaatctcccaaagaagcttatgaatctgtggttgagtatattcagaagaatagatcggacttagcatctcactttactaaaaatattggtttcttgattggtttagaattcagagattctaattttgttttaaatagtaaaaatgactatagaaagattcaaccgggtgattgcttcaatatttctttcggtttcaataacttggttgattcaaagactaatgatacatatgctcttcaattggctgatacagttcaattgcctttaagcgagtctgaagaaccaaagattttaactacctgtactaaggcaagaagtcaaatttctttttattttaataacgaagaagaggaggagaaagtgactcaaaagaagccggtcattcctgccactaatagtcagttaaattcaaaaattttaagaaccaagctacgtggtgaaagtcgtggtgaaaacgaagatgctcagaaagagcaaattcgtaaagaaaatcaaaggaaattgcatgaaaaattacagaaagacggtttgttgagatttagtactgcagatgctgctggtaatggtgatgagcaacgtcaatatttcaagaagtatgaatcatatgtccgtgagtcacaaattccaaataatgtccgcgatttaagaattcatgtcgattggaaatctcaaactatcattatacctatatatggtagacctgttccgttccatatcaattcatataaaaatggatcaaagaatgaagaaggtgaatatacatacttacgtctaaatttccatacacctggtgctgctgggggtatatcaaaaaaagttgtcgagttgccatatgatgatgcgccagaaaatcaatttttacgttctataactctaagatctaaggctggtgatcgtatgagtgaggttttcaaacaaatcgtagatttgaagaaggagtctactagaagagaacaagaacgtaaagtcctagcagatgttgttcaacaagatagattaattgaaaaccgtactggtagaacaaagagattagatcagatttttgttagaccaagtcccgactctaagcgtgttccttcaactgtatttatacatgaaaatggtattagatatcaatcaccattaagaactgatagtagaattgatattctattttccaatattaaaaatcttatttttcaatcatgtaaaggtgaattaattgttgttattcatatccatttgaaaaatccaatattaatgggtaaaaagaagattcaagatgttcaattttatcgcgaagcttccgatatggctgttgatgaaactggtacaggtagacgtgggcaggctaaatttagaagatacggtgatgaagatgaattagaacaagaacaagaagaaagaagaaagcgtgcagcattagataaagaatttaaatattttgcggatgctattgcagaagcctctaaaggtttagtcacagttgaaagcacattcagagatttgggttttcaaggtgttccaaacagatctgcagtcttttgtatgcccacgaccgattgtttggttcaattaatcgaaccacctttcttggtagttaatttggaagaaattgaaatttgtattttggaaagagttcaatttggtttgaagaattttgatgttgtgtttgtgtataaagattttaataaaccagtcacacatatcaatacggttcctattgaatcattagatttcttaaagcaatggttaactgatatggatattccttacactgtttctactatcaatttgaattggacaactattatgaaatcattaactgaggatcctcatcaattcttcttagatggtggttggagttttttggccactggttctgatgatgaaggttctgatgaaagtgaagaagaagtgagtgaatatgaagcatctgatgatgatcctagtgatgaagaaagttccatgtctgaagatgattattcagatgaagatatgagtgatgatggcagtgaagattttagtggggaggaaagtgaagaagaaggtgaagattgggatgaattggaaaaaaaagcagccaaagccgatagagtaagtcattttaaggattgattccagtaaacgttataatattaaggtaaaagtataagaagaatatacccatataaaacatttatacgtttgatatattatacgtagtccttttgtataaaatgtgtgttgtaaaattgtttatatttaattttactactgtttattaagaaagaaaacataaaataatataagtaaattaattatacacatacaccataaaataccaagtatagatattgcttgctatataaataaaaaaagaagagtcagatcattaatatagatagaaaagtaataagcttaagtaataaataaaccccctctgatttagttattatctaatttcgacttagtcatatttaggaccatgtagattgtgaattcatggcagaattcattaacattaatggttgaccatctcttgtttcattttcgatagtagcaccagcagctaatttctttgaaagatcttgaatggtgtcgttttgttcctttttaatggaaatttcaaatggtttaatatagtcatctagattatttaaccaggataactctaaaacaaaatcgtagctaatcaagtgataggcggtatataataaggcaacaaaggcttcatgattgccagtatcaacaaaatatgttaataaatcctctacaactttagaatcctgggaaatagctgcagtttcgatggcatttttccaaagcttgtcttctttaaaaatatttaaactcttggaccatttcttgtttctacgatatagtaatgcagcaatttccctgaagaagattaagtcgtgggattcaagacgtgcagcaagacctaattggtcaaacttatcataggaattaacagcatcttgtaaagctagataatcctcttcttcgatcatcaaatcgtgataagcggcatttacaacaaagttgtttttgggtagaacgttaattaagaatggtttgatcaaaggtaagttgtccgaattggtaaaaagcttaacagttcttggtatatctagtcttggggttaaaacagataacaaatcaattaataacgaaggatgttctttcacatagaaattaatggccttgtaatagagttctaagttggatacctttacaataacttctttaaagtaatcatggtcaaagtttcttgcagacttttcaatcatggtcaaagcagcattatcccattcatcataatgagcatataagaaaacaagctcttgccataaatgggcgtcttcgacagctttaataacttttggaatattcaatctagaccaaaacaattttaagtgttcaaagactttagaagtatggtacttggcatataagattgctaattcagtaaacatacccatatgagctctctccaaccctaacccagcttcaaatagagatactaattcttcaaagtaaccgttagtttcatatttggcaacaacttcgtcgagttcttcagcatgtataattaaattcaaaccacaaatttgtgctaatctaaattctttttgttcgatacaagcattgttaaccaacttccatacttttatattggaggcctttctagcggtgtcaacagcattttggtaatcgttcaaatatactaaagtagaagctaattttgagtagttggaaatagcgctgaaacataatttggcggccttgtaatttttgctttccagaagttgatctccaacaacatctaatttagcaacagtagaagtagataacagattttcaatttcatggagcttatctaatcttgcatagcataatattaaagagttatcaatcttggaatcctttatagtttttctggccatagttaaatatggtattaattcttcatatttacctgcatgctcagcaatctcgattacattttcgaaatttgatgggtcttccgccttgatgtaagaatcaattgcctctggaatacgtaaaccatctaattgagcagaacctagttgagaccataactctggagtattgatcttttcaacgtagtctgcagctctgtccagagacataatgtcttcaaccaagacttttaatgctttgctgtatacttcatgtttattataaatttcaaaagcttcttcatttaaaccatgttcaatacataatggagcgatttcatcagtatcatagttttcaagcttttcaatatatgtggacactttaaccggctcgtatttaatggcagataacaataataaaccctgaagagcaacattatcattgaatggggatggttctaggatgatcttttctaataattcaattaattctaatttcaaaccattggacataaaggcttgaactgtaattgaaacaggctcaggatctattaattcgggaataccaactgaaataactgattcaatcagttgacgtctgtgaatgttttcactatcaagaaccttgttccataagtttagattggaacgtttcaataagtacctgacttggtatttatacatactattatcattagtgatacgaattaaatcatcatcattagaacctttatcatatgcaatatatgccaagtatggatctcttttttcacagtagtggccaacatctaaagtgtcatactgatcattttcttttaagaatttttccggtgaattattagagtcaatgtaaatttttgctaatgcattatagatagctttatcatgagcaccttgttcaagacttttttcaaggtaaggtaataataattttagtctgtttcttttttcaacttcttcagttaattcgctgataggaacttggcctaagacagaatttaataaatcttggataaatttttcatcacaatccatatccaatagagcaccaacgacttctgcagtcttagatgggttaacttgttgcacataagtttcaataaattttgagttttgggatttgtaaaggtgtaagatcatttcatggacaaaaccgaaacgatcacagacaatgacaaatggtaattgatcttctaaattagcattctttaaaaagtttttaactctttccggatcaaaaacgttattgtttctaacaattctttcaatttcgttgtattgtttaatcttagcggcggcttcgatatatttgtacacaacatctttatcatcagttaagttaactaaagaagttaagtaatagtacagaccttcggtagccttgtaatcttcaaataacttgattaaggtagaagaaccaattaagtcagaaaatttagtagcaacttgaactacaatttgtaaattagcttgtaaattgttatccattaaagcctttaaacatgttaatgtttgctccacattcaatttaccgaaaaaagcaactaaccagtcaacaggtaagacatctgtgtgaataatacacctctttaaatcagataaatcagtatagttttctaaagccctttgatataaaccagctttttcggctaaggaagcaattgttggtttatcatagtgggagaagatattgttgccaaggatagcatctgcgacctgtggtgcgtgcaacaaattaacttcaagtacttttgtttgtaaatggccttcatctggtgtatcattttttaaggcgtccaataacaaggaagtaccttgttgaataaagttttgagagaagaataaatcggcaatcttttcaatatctaatttagaaccaactttagggttttgtaataaagaaatagcaaattctgaggctctgtctggggatgatctgatgatacttgaaatcaaaacaaggaagtttggttggaagttaactttttgacaataaggtaaaattttgtcaaattgttgtagttcggctaacgtagtaacgactttagcatgagaattagctctcaggtaacaagctaaggctaaagtattgtcaaacggtttaacaatgtcacccaattcttctgagcattctagtttatcttcctttaaccacttttcaaacaactgttttctatcttgctgtagaacaggtcttgctaattcaattgtttcttctgcgttcaatttacctttatctaataaagttgagaaatacaccaagattggagaaatagcacctggggcagcttgaatatttttcaatctattgattgtattactatttctcaaggaagtggaagaagcagcaactttagcagcattttggtaatctccgttagccaataatgtttcaaattgtttgttgaaaagatcatcagcaccaggaagaccacctcttttggcaactgttagagctaaggaaacattagataatttttctaagatataaggaacaatttgttctttggcgacttccacagcaagtacttgaccttttttattgatacaagcgataccgttcttgttgcgataagatgttgaagtgaagacagattccgcagtaattctattgacaaaaagattagtacctgtctccaattcgtaaagatgaatgaacccgtattttgttaagatgtaaataataccatatttctcagagacttgaacagcgatagggaaatcatttgtggcatctggtgggaaaaagatatcggtacttttcttagagtattgaacaggtaagttggcatcatggtcaatttcaatgattcttaattcaccattcccagtgttaacatttctattacctgtaacaaagacttgaaccatttgagatccatttccttccaaaaggatattagtaaaagtagccacatgaccatcaataacttgagaaatattacggttttttgagtatagctggattttaccagcaatcctaccattttcttgcattataccaacaagtgcaaaccaatctaacttgttgttggcgatgatattgataatttgggtattatttagagcagcatttctttgagttaaaagggctggtttgccatttacattaccatcaaaaacatttaaagtatagatatttctagcagataccaaacctaaaacatcattactcaaccatttccaaaatataacaggttcatccagggtgaatgacttcaacttggtcttggtctctaaattaaagatttggactattgtaccgttagctctaacagagataaccatttgctctggatgcatgattgcagagtcaccacccatattttttctaatgatttcattatttttagctagattaacgatagcaactgaatttgttgagccatcagcagaagattctcttacagtgacaaaatggtcactttcgaaagttgttgatctaaaatctaaaaactgtggattaataccaatagaagttaaatcaactaattcagtgaaatcaattggaagatcagccatgattgtatttttgtttttgcttatatgggtatagaattagaaaataaaaaacaaaaatattagaaaaaaaaaaaggtaagtatctcttcttcagattatgaataaatgttgagtattgtgataacagaataaacgaaaacaattactttaaacttgaatgaagccagaatttaattgtatgaaataagaagtattgaagtttagaggggagatttgagaggcagtcaatattcttatttaactttattatatccggtgaggctttcttgttcttgtctcttcttccaaatagtaataggaaatcaaataaaataaatcaatattacctgtaacgttatttgataacccaactggaaataacgaaaaaagttcaataaaataagtgttaaaagtgagggaacaaatgaaagatagaaatgtttttgagaaaaaataaaaataaaaatagattagatcagttttatattgtgatggttagttagcgttttgtatataagaaaaaagtgttaattgaagtaggttaatgtcaaaagtgactaacaagggagtatatgagaatttgaatgttcttcacaaaataggtttgtattttttttttttttttcatttacttttctgtttggttctttcctttaatcgaacaatttccttttcctttcctttttttgatgaatattggacgatctatgtttctgcctccctacaagaaaaacaaaaaacaaaaaaaaaaatattaatgtaaattacgatttcaattgcggaatttttgtgtactgggaaatattgtctgcgttatatttgtttttcattcttttacggaatacttttttagggctattgcagtaattttctctgttttaacaacgagttgagagaaaaacattaggtgttaggtgagacaaagggacaaattagtgtgctgagaacatagaaagtagtgtattagggcgccaaacttacttactagctcggtgtgtatcataaaaataaaatattttggtgttaataatatgacttgtaacgtgtgaagaaggatcttgttttcacttttattctttgggggtatttagcctaatatatttttttaataaataaagtctataaaaacattagggtaaattatatattgaagcgtacagattataatcactatttacgaaaacagggttttttgttgcaagaaacagaagatattaataaaaattatattttttttttttcttttttgaacttttcttaataactttaaactatcaagcatggtatgttggagaaaaagtcgtttcctaacgtaaaaggctttgtttcggaattaacatttccgctatgtctttttttttttctttttttaggtaaattcagcatttttctttctttacttttgaaattactagaggaggtttttttttattctagttattataagttctttggtgttaataattaagtctactgagcatttagtgaaaccgactctacactctacttcaggttttagtagaaggttagctttatggaacagtgaaaatactttgggcagagaataagaaagttgtgctgtccgcctaagacgattttgtttttattttttctttttgttttttttttttttttttttttttttgttgataaaattgacatatagccctggataataaaatctagggttgagcatttgaattttcggtttttttctcaagaatctagttgtggccctaatttcattctatataaatttttccttagggtaagaaatttttataatgtaaaaagagggctttaaggaaaaattttgattaacaccggcaaatctttacattggaaaaaggggattgaagttttcttttgttagtgatgtctcattgcttggagtctcttttgtgttttagttattgtgccgtcctttgacacaatatggcaataatatatattacttacagaaataaaataataacaataataataataataataacaacgatgatgatgatactggtgttgatattgatcatgattgaaatgagcatgacaataaataataataataataataaatattgttattactattaaatatttggctgaccttcttttctccgtctatgctcttctccattgtcatacttgaatatgactccaacaagcaattgttaaaagaacaatcagcagaaatatccaaagaacaatgttattgtggcaaaacaataaaaacacctttgttatattattccatgattacgctacttttgttaaatgcttcgttttctgtttgttttctgtttgtttttttgtgtaactatcaattggcagtaatatattaattataattatttgtggaattaggggtttgttaatatgtatagaagcagttcaaaaattaagtataaaaagcaaactgttgtattacattctgaagtagactttttaaatattatgattcacgaataaataaaagtttgtcctgtaatattcaaattatttctaccctatttctacttacttatttcaattcttttttaattgaaataagaaattaaattagaaaataagaaataaataaaaattgtaaagtgtgttatcaaaaaaaataacagacttgattggaaattatgacaaaagtaacttctgtcaaatctagtgattctgtatttaatcccaaaaaatttattgaaaatgaaagaactcggtctgctttaaaggtcgaggagattaactgttttttggaatctaacccagatgatcaaaagataactcatgaattactggaacaaattatcactgatccaatccttaaatgtgattcatattattatgataaggaaaaaaatcaagaaagagaaataactgccagaaaaattaaacgtctttccttatacatggaaaatgatattaagttaatgcaaaagaaccaagtgaaaagagaaaaaattgatattattaaaaatttgcaactaaacccaaagtcaaaatttttggttaataaagatttaaacatttttgacaaaagattgtctttgattggaatgatagatccacaattgtccacgagagttggcgttcacttgggtttatttggtaattgtattaagggtaatggaactgattcacaaattaggtactggttacaagaacgtggtgcaatctttttaaagcaagtatatggctgttttgctatgacagaattagggcatggatccaacgttgcagcgttagaaacaacagcaacttatgatttagattctgacacatttcagattaacacaccatcactaactgctacaaaatggtggatcggtggtgctgcacattctgctacgcatgctgtggtttatgctagattgattgttaaagaaaaagattatggtgttaagacatttattgtcccattgagagataattcgaattttcaattattaccaggtattatcgttggagatattggtaaaaagatgggaagagatgggattgataatggttggatccagtttaaaaatgttttaataccaagagaatatttgttatccaggtttgttaaagttatccctaatcaagaaagtactgatgtctctgtaaaaatacaaccacaattagatcaagtgtctggttacagtgctttattaagtggtagagtgaacatggtgatggattcattcagatttggttctaaatttgtaactattgcaacaagatatgcagtgggaagacaacaattcgttcaagtgaacgaagttgggagaatagagacacaatctagtaaaaagaaagaacagcatggacataatattgctaacgttagtaataataaagagacacagttaattgattactcattacatcaatacagagtgttactacagttggctattgtatatttaatatctcctgcagcacatgatctgatgagtagttattacaatactttaaatgaactgtatgaaatctcttcgccaaaatcagataaacaacaggcagatactactgacaaaaatgccttttcaacagtcagctccaaattaaaaaatctttttatttcctctgcaagtttgaaagctacaaatacttggctaatttccaatttaattgatgaattaagacaatgttgtggtgggcatggttattctcaatataatgcatttggcaaaggttataatgattgggtagtccaatgtacatgggagggtgataataatattttatcattaacatcagcaaaatcaatattaaagaaatttgtggactctgccacaaagggaaagtttgatgaaggtttggattctgacgattttgattatttggaccctgattttatcagaaaagtatatactcatgatatttcagctactttagaagatacagatgacaatactaatgaaagtttagaaacatatattgaaatttggaaaattgctttaattcaattgcttattcatatcggtaagacaattcagaagactaaagattttgatcaaactacgatattactagtaacggtatccaaattccacgctattcattatatgttaaaaacgttttacacgaagttaaagcatgatgagatatctcatattactgatcagcattccaaagattcactctggaacattttcaaactattttctgtttactttattaataaatattccgggcaatttcaacagtttaaaattctaaagcctagccaaatatcatctttaatccagcctaaattagttaagctattaaaggagattagaactgattgtatcaaattaacagatgcattcgaattgcctgatgctgtattgaattcgccaataggatactttgatggggatatataccataattattttaacacagtaactgctaataatccaccagaaagtgatgatccaggtaaaccaccctaccataatgttctgacctccatgctttcgagggattacgaatatgattcaagattaggtggttctttaaataaagatatcttagagaagttaggtaaataatacacattgttacatgcagattgaacttcttttgatactagtttttttttaccgattgttgttattattttaacagatccattcttatacgttttcttatatgaatggtcttctcctcatgtatttcttcacaaatttttattaacattcaacagaatctattagcattattttttacttcaaaagtatataattattagtattatctattcatattaatatttaatttcaacaaaactaatcattaattatgattagaattataatattcagttagttttcagtcaattctgaaccaaatactaatgcatcctatttctagaaaatcagtatttggtgaaatttcaataattttgtatgtattctctgtctctcttctattgttgagacacggcatttgtgagctatattattcgatatgttggttgcattaaaataattcttaatgtttacctattgtatttctttgatgttgaatatacttttatgtgatttgtttgtaatcatcagagtgtgaatgtgaaaatttgagattttctgaaacaaaaaaacaagaaaagaaaagaaaagaaaaaacacaaaacacaaatacaaatacaaaaagcagctgaatataaacaccaattagtataccatcttacaattggtgtctaatataagaatatatctacactttctgatatatattttatcaaaactaattaggctcacaataattttctttttatagacagttttttagttacttgtttatctaaaatttgtttgattgtaaaataattgcaagtttaaagaacgaggcatatcatatttatacgtatccttcattcttatttcctcgtattttttataaatagaaacaattaacgccatgtctaatttaactaaaagaaaaatgaataagtttgttattgaagaaggtgaaaataacgatggtcttcatgttgacatcacgcctgtattaagtagaaaggcgtctagtattttcagtattgacactactccattagcacctcctaatgaaagtgatattgctaaatttacaagtgacgattatcattttagtatgattagaaatttacatatggcagattttataacaatgttaaatggtttttccggattttactccattgtaagttgtttaagatttacattaactagtaaaccacattatatgcaaagagcttatttttttatatttttaggtatgtgttttgatttccttgatggtcgtgttgcacgtttaagaaatagatcatctttgatgggtcaagaacttgactctttagcagatttaatatcatttggtgtggcaccagctgctactgcttttgctattggttttcaaactacattagatgtttttgtattatcttttttcgtgttatgtggtattgctagattggctaggtttaatgtcacagtcagctatttgccaaaggataaaacaggtaaatcaaagtattttgaggggttcccgatgccaaccacattattacttgtctttttcatggctatcttagtttcaaaagactatgtttttgataaaattcctttgggtattgttagagaaggtaaatactttgagtttcatccattgattttactattttttgttcatggatgtggtatgatatcaaaatctttaaaaatccctaaattgtaatctgactatacatatattgaataaaatgactataacaatttaagtattacatatcttttaattctatagaataggagatacgaatgtttagtattacgtctatgtaaataaattatcaaataaataagttttgtacattttttttagatatgtctacatgattaccataaggtaaattaataatacaattatcattgtcgccttatacttctttcaattatcaataaaagaaaaactaagattattttcttattaatattattatattttaaaattattcaaagatacttaattgatgaaggaaacatgactaatttgtattggtttctaacagcttgacaaaacatccaaaaaaaaccactaatattgattttatatgtcatgaagtgaagataaaagatgtcagaaacacacaatactaaaaatatatatagtaaatacgttaataaaatatgagttagtagtattagacataaatatacttttatacaagaaaattaggtagtgttttaattatgtctaaatggttttattggtgaaatcgaatgttctataataaattgatagaccaattagattttagtaaatataaattgataatagaattcggaaaatgtattgtctttttatcagtgagtgtaaataagacatattaataaattagtgctgttcgtagaagagatatatcagatataaaaagatataaagtcaacaattttttcatatcatacctttttccttgtgtatcttttacatattatcgtctatatattatatatacagaaatgatcgaagaattttaacataaattggtacaccataaatatatagtataatattggaaatgtttattatatattcaattatcataggtgcttattcctaatatttattcttagtgtcttttcattgagtctagacttaatattttttattatgtaataataaaaaaagattatcaaggaggtggttttttgattccagatacaaaataggaataatcataaaaatatttaatacaaaggaaagaattttctactaaatatgaaaaaaatgtagagttgttgtatgtaaatggatgaatcatatcaattagtataaatataaacacccttacgtaagctcttgttgagaatgagcgcctttattcattggatatatagtaaacattctcaatattatattaaacagatttagtatacaaaattataataaagttcttcactttctttctttatatacaacatagaaataataatatagaaagattgtaaataagataaaaataatgtatgaagaaatccttggctttatatatgttaatattcagccattttcctctacgaacagtaagatatttaataaataaactcaacaacttttggtgacctctcaacaattattactcaacaatttatcgtttagtgtctgctaaaatcttattgttctatctattttatcataaaacattctatttcaacataccacccatagatcaattcaattttagtagatccaattctcagttagcttggcaaaaattttaacactcaaaggttttgtaagaatatcagcaacgttttgacttgtgttaatataattcactgatatattatcattttcaatttcttcagcaatgcgtaaaaccttagtaccataaaatttattcttgatttttgatatgtctcttactttgatttgatggagactagtttgactgtcagttaatattgaacacctgacctccttgtctgatatagcctgaattagaacatttaaatttcttaatcttggaattgcttcacaaattgaataaatttcactttcggtagaagaggtgcatgtaattgttgacttagatgacctagcaccaatcaaatttccatttagataatacatatttccaaattgtgatttcatatcgtgttgatttgcaaaagcagcatcagttacagcagttaaatagttaatgttggagttggacgtcttgtgccatatgagccgtttgttccttgttgaccaaataaactgaattagttgtttggttagactcatgacttgttttgatggatatagagtatgtctagctagcgtgttgacataatataatatatcatatctgtacttgtaaccgacatatgaagctaaaccgattgctttttgtagccatttcaccttattcttgtactcctgctcagtcggataaaattccctttctcttataatttcattaggtgttcctgggacttttctacttttgttaaggtctacacgtagattcggtagtttttcttctaaagatttagccatacccattttcatggataatcctttaatatattctatttccagaccgagaacatcatattgattaatcttttgagcaccgtcattgacaactttggtttcgaactgtgattggagttgagaaataaggtcatttattagttgacgattattagttaataataccatatcatcgacaaaaagacataatatcacgattgaatcattgatttttttataaaatacacaaggccatcctggtacaaaattcatatgacaactattaataataaaattggttatcttcttataccagtttgcaccagactgtttcaaaccgtaaagtgatttctttagtctatgtactgtatttcgtaatcctaaatggggtggagaacgaatgtacagttcttcttccaatggagcatacaagtaagcagatgatatatctaattgtataatatcatagttgttttgtaaagctattgatagacaggacattagagcgtaatggtgaacagtgtttgacatcagatctggttgataagtcgaagctttttgttggtctcccctagcaactaacctgcatttgtgatgaccatctcgcttgacactaaaaataaacatagagttaataattttggatttgtctacttctgtagcttcaatagtttttaccgaccaggtacccattttcgtcagctgagatatctctttatcatatgcttcttggaatttttctttttcaattggatccctattgtgtgtgattgcttgaaaatattgtaatggaccatgctggttgttctcttcactgctgacctggtttatggtgtggcgtgtagcagcaatgtaatttactgcatatgtttttgtagttttcctacgtttaccaatacgtgccttagttctttcgtccctgtctcgcttctgccgttctttggcatcgacaggttcaggcgtttctacattggtgttcttttgacgattaccagatcttgtaccacccaaggtactattgtcaacgtagaaattatcagtaggaatgggggtgagttttgatgaacgattactagatggtggtgtagatgaagatgtagatgaagatgtagtatcagtagagacagcagtgggcagtggtgatgattcatcagaagtaggatgagatgaaggttcaacaagagttaagggtagttgattaggatcattgatgtcgatgggagtgattagttcctctaaatcagaagaggtgggatgagtagtgtggttgttagatggatttgaattggaagtagtattggtggtgatattcaaatcagcatcagcatcattttgaattaaaattttatctttaaagagtggatctttgttaacgagggaagatgatttgggtgatgaggatagagtagataaaactgtatctttatgattatcagaaggtgtggcttcaatttcgtcctttgaagatgtagtatgttcaaattttgatataaaagttgtgatgagatcgtcgaatatagaatcatcatattcttcattttcatgaatatcaacgtcatgtttaattggaacaaaattggatgaggataccaccctacgtttagttgggaggtaaaataaatagccataagattcagcatctggtattagagcaaaacctttttcacctctgacatgtaatttggaggcagttttattgaggttaataatgaccggttgaccgaatggtagcagtgacttggtatcaagtcctagtaaaccgactttagaccgaggtgaatccctcatagaattgttatatatggaattacggattatagttgcatattgcacagcgtaataccataggtggtgtgggagttttgcactattcataatagtacgacaatcatttaataatgttaaatttaatcgttccgcaacaccgtgagcttgggaatcacctgcgtcggtataaacaatttgaataccgttttcagaaagaaacgtttttactgcagagttggtgtactctgttccccggtcaaactggaattttaatatgggggttttgaattgtcgctcaatagtcgcaataaaggacttgaggacatgtaggatcgttgcatcatctttcctttttagtaaataagtccacttaaacttagatgcctcatcagtgaacgatataaaccattcaggttttgtagccacagttactggtccaaacaggtcagaatgaatatattgaaatggtttgaacacctgctggtattgcagacgtgaaccaacaatatgtggtctcttcctgctttttcctttgagacagtcctgacactgaaaattgttaaggttagaccaatcaatttcgtctatagatagattattgaaggttttatttttgatggatgtatagattgactgaacattgacgtgacctaaaatgcgatgaatcatgtctaaaggaaatttagtttttaacgcatttacagatttacgagttgcagtagatggaaatacaatatgatgattggataaccaatgtaaaccatttgaggagtcaatgtttgctgcaacatcaccattagcatcttcaatggtgttgagacgctcgtttaaaaacagatggtgagaacggagatcactagtagataaaatggtgtgatcaattgtgggtgtgtaaaaggcatgaatttttatttggctgccatttaatgtttttagaattaaatcaccctcttgatcgtatgggatatccgtgttggagcatgaggttatttgaacagattcaggatgagagtcacgaagattgtgcaacatctctttatgttttacaagggtaaccgtagcaccggaatctagcatcatataatatgcaggatttagtgaagttgaaataggcctaagtaaggttggatcgactgggttattttgttgaggaatagaggtgctatttgaatgggttttaacttggctaacctttttagaacgagctttggtagatttggcttttggcttaactgttgaaggaactgtagtatttttggtgttcaacacagtagatgtgttgtttgctcgtttattcactgatggatttgttggatactgtttttttgaagaagatggaggattaggggaaaaatgtggatcggaaatttgtgaagcttgatggtagtattgatattctctcttgatagaagagaaaatgtcgtttatagtatatggggtatcactcttaaaaaagtgtttagaaatggattcgtaagtacctgttaacgtatcaagaattgtttgttttagcaggtactcgtgggtttgaagatccgtggggttcaattgatcaattaagttatggagataacttgtaaattgaaatgctgggtagccaccattatattttaaagatctaatagtgttgataatggtattgacattactgcgttcaatgtcgtatgtcatggcctgacgaataacatcatagggatgcatttgcttgtgaaagcattcttgaacccaatcgggataactgctctgaggaacaagggtgaaaaataaattaattaaaccttgagattcttctggcgttggatctcttacagtacgatcgtgtgaatcaggaaccaaatcttttagaccagaagcaatcaaatgttttattaaggaatgaacccaggagttaaatagaccaacactagagcagtaaaataaagtagttggaatgtatgggttgttatatgtacatgaatggttaggtgaacctggaaacattggttggattggattgatgggagaataatatcccggtagttgaccataataaggaaatggcatataagcgaaaccagttggttgttggtaaccgtttattggaatatgatggtcatatgatggaccattagtaccagaatcaggataggatgactttccagcctgagaaggattgttcggcgtggaagaaccgtatggagcagattgctgatctggagaagcattgtttccagattccctagaagatgggtcaacatctgttgtagcatttaaattatgttccaactgagggttggatgggatgttggatgcagtggaagcgtcttgactggtatttatgttaaaagctttaataccagcgcccgtggagggatttacagcactaggatcactagtgtgtccagacagaaagctaccatgttgagaatgagcgcctttattcattggatatatagtaaacattctcaatattatattaaacagatttagtatacaaaattataataaagttcttcactttctttctttatatacaacatagaaataataatatagaaagattgtaaataagataaaaataatgtatgaagaaatccttggctttatatatgttaatattcagccattttcctctacgaacagtaagatatttaataaataaactcaacaacttttggtgacctctcaacaattattactcaacaatttatcgtttagtgtctgctaaaatcttattgttctatctattttatcataaaacattctatttcaacagctctatatattactatttaataaccctgatattgtagtattacttcttcttgttgtttttttttgtatgatattaagagttacttcttaatatcattactaagatgtatttaaataagatgattacccctagcctatctctcaataattaaaggcctcttgacaagatctgatataattatcgctccctggaaatcctccaatcagagtcaataccttatacaagccactgcgcacatggctgtaccaatccttcacccagacactcaggtgttacccttggaattgcgtatctactggatttccagttacgctccttacaaaaaaaagctggtttttcataattgtaggaagttctaattggaaatcctgaaatatgtagtctgcaagtaacactgaatgtcaaggcgaaggacttggaacaattaaaactctggacccaaggttgtgaatgtattcaaatgattcatcgatcgtggaatgggcttggtagtaaattatcggaaagctttatttaagagacctttgattattgagacatggtactagagataatcgtcaacattaacattcatattctatttaatagttataatcaaccaattatataatgcataagcgtttatatatttaatcaatatccatatttgttgaaatagaatgttctataatgaaatagatagaacagtaagattttagcagacactaaacgataaattgttgagtaataactgttgagaggtcaccaaaagttgttgagtttgtttattaaacaccttactgttcgtagaggaaaatggcttaatgttaacatatataaagccaaggatttcatcatacattatttttatcttatttacaatctttgtgtattattacttctatgttgtatatagagaaagaaagtgaagaactttattataattttgtatactaaatctgtttaatataatattgagaatgtttattatatatccaatgaatacaggcgctcattctcaacaatattttagtatactacttgaagtaatccttacaataatatataagtccttttgttttttattattggtatttgtgacaaatgaaatcctgatgttattataaacgattttgtgaacacttcagtcaataacaacgtttttgttttactcgtttatataagtgcaagtatctgtatatctgtgtgttttaattcacctcttgtgtagagtataatttatgtatcatatacaggcaataaatcaagaaccatttatctattttagtaatctagaagaggtatctcttgcaatatgtaatatcaggggtattacattcttgtttttcgtttttatcttgtttatataattatgtgtatctgtacacctgtatatattagtttactctttatgtcgagtatagtctatatgtcatatatagacaacaaccaagctatatctatctattttagggtctagaagagtatatctctcgtaatcgggttttcatctattacagctatcagaaacacataacctcaggtttgttacaccataggtcctcatctgagaggcaaaaagaaatgccatctcctggaatcgaaccagggtttcatcggccacaacgatgtgtactaaccactatactaagatggcaggacatcctggtattttgttgtagaatagaatagttataaccatcaagattacataagatcctgaatgaatctagaaccaattagtgtattaataagccatacatgtgctacaacattagatgctgcataataaaaagattggattacataagatcttggcaaatctagaatttacctattgttttattaagtcccacgtgtattactaatcaccatgattagagaattgggatgcagttctaatccagtagtgcacctaaattaatataataaattttagggtttgaatcagtcaagtcattaatgtagtaatctgaataatcgatcgagctccagaaaacatataaaaggacaacgttttcaggagataaaagatcatcttccataatcgtttcttgtaaataatttatatattatgtataagcaagtaacaagtcaagtaacttcgaataagtacattagctcgatataagccgcttaatatataagaccgttttagtaattatactatcgactatagttgattactgtctcgattatttgaattactattaatattatttgcgcttccccggaatacacaaagaacttcaccacaccatactacaacatatttgtcgtagatcaaccttggtattatgattatataaaaaaacgattagggttgaaaaatattgttagggttttgtgatggttgtcaagaaaaggttctagtctagtttggatttataggacttagggtttgttgataaatcccatgtgattgttgaatactatgtaacaaaatgaaacattcatgaaacattaaatagctaattaaggagaaatgtatctacggtgacagtcgttacagaacctcaaataagaaactatcaacccatagttcatatataaaggaccagtatcttggtatctaaatttatatgtttggttgatttataattatatgtagcacatcgtataatacaaaaaaaaaaaacaagcaataaacccttaaccctcctagatatatataagaacgttatatataggagaattaaggattattgcttgtttttctatttatgtttatatacaatatatagattatttacaaaaaaaggttatggaagatgatcttttatctccggaaaacgttgtccttttatgtgttttctggagctcgatcgattattcagattagtacattaatgatctgactgattcaaaccctaaaatttattacattaatctaggtgcactagtggattagaactacacctcaattctctaatcatggtaattagtaatacacgtgggacttattaaaacaataaatagttctagattcattcaggatcttatgtaatctcgatggtcataattattctattccacaacaatattatgatagttaacagattcttattattagttgtagcttattaagatgactacgtatatgttattatgacatagaatgttgaaaaatgagagtttattactgccatttccataagaattatttttaattagtttttttgtatattatgtggtgtatggatgtaccataatatatcggaaacattttgtttctcaccaaacatgttttttagagatttgaaaagaaataaaaaacttaaaagaagacttgaaataaatacaaggatgtatactgtatacgctatataataagtatatacatatatttaatataaaaaataaaataatcatttataatttaataatgtctgccattactatggacgctgagtgctccaaattccaacaaaaatatatataattatagatctgtcaagatatgaacaatatgctcatggggtttctttattaaagactgtttttttattatattggtaagaatggaattagaaaaaaaatatatttcgtaagaggaaaatatttgaggatataattagaaaaatgaaggatcaatttgtatttctgtataaacataatgtatagttatgtatgttatttgtgtaggtttttaataaactggatatccgatttactagtaactggagtcatgacaaggctaactccaaacatcactacttttcaagaaggttaattatacatattagtggaatttgcaactcttagtgtttatgataatgagaaactttattaagtttatatgtatatatgtatatatatattatttttatattaaatatatgtatacacttattatgtacacagtattcggtgtaaactattttatttttttcaagacttttacttaaaatgttctatatatattatagtacatttgcatattaacatattatacgcaaaaaataatttgaagataattcttatggaaatgacaataataaaactgtcattttccaacaacattacatgtgggaaaaccattggttaaattatattttcgtgtaatgagtcatttttatttcatatccttcaactcgaatatgttctccacttctgcattgttgggtgcgaaaggagatgttggaattatgtgatctgctttggttgtttctatattgttatgatcatttgtattatcttcgaaattttcttctaaggaagtcccattttcaagatcatccgcccaagtaaccttctttttttgattaccgatattttcataagatgaaccaaaaatcttggataaaataatttgacgatatttgaggccaccataaaatataccaaccaaactgaacagagatatcataataattccattaatattgtctttattttcttctttgtcatcttcttcctcctcctcgtcggcatcttcttcttcttcttctttttcttcttcgttatcattatcatcagtattcttttcttcttcttcttcttcttcgttttcttcatctgtttgtttgaatggtgaaccactagtgattataatatcttttccttcagtagtagataataaaacctggttcatagaaatatctataattcctctactaatttcacttttatcgtatgggaccatatgagatgcattaaaaacactaataaatgtcaaatttttatcatatttgatgtaccctacagtttcatctaaaccagaatctggattattgtaaacccattcataatcttgaacattactggtaaaacctgttgatccaccccattctaaattgctaatactgtctaagatacctttattattgcatattaaatccttatcaccattgaataaaataatttcaataccatcacttaataaatttggtagcaaagcgattgattgtgccataccctggttagttagttcttcatcgacttctagtctgcattccttccaactattctcccaatttttatttatatgtaaagcattttgaacttgttgttttgaaaaaaatttggcgacattactgatatcttcgggccaattcattccacatgctgggtatgagtctcttaaatcatagttatagacattaatacattggtcttgttccacatcacttgtaatggttaataatgtttgtaaaattttctgacattcagggtattcaaattttgaagaggaatcgctaagtgcagagttgatcttattttgacaatcttcatgttgttttagtagatctatgaaaaattgtgattgcctatcaatgagtccattctccatagcaaatggcaaatatgataaggattgagaagttggatctatccaaccattcccgatcaaaagagatttcaaatgatatagcttgtctttcagatcttgtgaaacaatttttttattgcggttctgtatgaattttgcaaaatatgggatatattggcctgcataactttcaccagctaaaataatatctttattaagatccattggaaaaagttcgaaatatttatttaagaattccatcaatctttcactgatcttgttaagatctttctcaaataaagtattgattgactcacctttaaaagacgaaaacccagttccaataggttggtcaacaaacaccaaatcacctcttgtatgccaagagcccttatttatgattgcattccccttatggtctattctaaatggacctatttccaccaatgcaccatccatggaagaacaacctggaccaccattaaaccagaatattagaggttttgtatcgaaatctttattatgttgtgatgatttatcttgaaacttccaaaagaaataaccgaaatctgaaggaatattgttgttgttgtttggatcttgtttaatatcatcaaacatagaaatgtgacctgcatacatttgtggaatagaatttacatctttgattttatcgaggcccggtagttgtgtcgggtcaactaagtattggtttaataatagatcatcggaagtactagacttatctgcagcccatgtcaacgataaaagatagcaaacacatagtagtaaatgtaaatagtattcaccactaaccattgtcttgttatctactaatattctcaggcatatgagttgccaacatcatcattcctaacattatatcgctttccttaatgtatgtttaaagtctcgatggttgtcgttattaaagctaaatcaacacttgatggaaatttcaaaaatttaagcaatttttcgttttccattttttctctcgtggcttttccgaactgtttgggacatgttttctatttccagatgtctactatctaattaggaaaatgtgtcttaaacagaaaattgctcgagccacagaaacatttttggtgtttttctttttttctgctgttttccgcaatttgccgcgatgttaaacttttgtgaagggaaaaacaagaaggataaaaaaaaaagagtaaattttaaattccactgtaaaaaaataataaaaacataaacagaaacaaacgaagcaaaggaaattttggaaaatcttctcaccaaaaaagttggtaaaagaatcatttcgttttcatgtgtatgactcttactttattctcatttcagtccggttgggttcaattcgtgtcgttctatgtcattttactttatctttgggaggctgttcaatcgatttcatatactagtaaaataaacaaacagtaaaataataacgtatatatatatatatatatatatatatatatatatatgcactaatactcgcttgcgtctgcaagtatgtatatacattcttatttatctacttacttgtatgcatctacgtatacatatacatatacctgcttctaggtgattaatcgaagataaaataaagtttagaaccattaaggaagtatatatcacctgtaaagatgactctaccagaatccaaagatttgactcatttgttctctgatgaaactagagcaaggaaaccatctccattgaaaacttgtatccacctgttcaacgaccctaatattattttcttgggtggtggtctaccaatgtctgactatttcccatgggataatctatcggttgattcaccaattccacctttcactaaaggtattggtgcctcaattgattccagaaataatgatatcttgaaagctgaattgaagaaaaatgaaaaattacacgatggtgatatcccacttgcaagagctttacaatatgggttctctgctggtcaaccagaattgatgaatttcttaagagagcacactacaataatccataacatgcaatataaagactgggacgttgtggctaccaccggtaacaccaacgcttgggaatccactttgagagtcttctgtaacaggggggatgttatcctggctgaggctcactctttctcttcttctttggctgctgctcaagcacaaggtgtcatcacatttcctgttccaattgacgaacatgggataattccttcaaaattggctcaaatattagataattggactgaaggtgctccaaaaccaaagttgttatatacaatcccaaccggtcaaaatccaacaggttcttctttatccgatgagagaaaggaggaaatctatgagattgctcaaaaacatgattttattattattgaagatgaaccttactacttcttgcaagtaggcagatacattaaggaccttggtgaaagagctaagctggagactgatgttagaccaacccatgaaaagtttttacaatctctagctaagactttcttatctatagatactgaaggccgtgttattagaatggattctttctctaaagttttggcaccaggtacaagattaggttggatcacaggttctaaaagattgttgaaagcttatatttcactacatgaaatgactatccaggcaccagcaggttttacacaagccatggtatcttctactttaaataagtggggtcagtcaggttacttagattggttgatctgtttacgtcatgaatatctattgaaacgtaaccatgctattgattgtttgttcaagtatatacctgatacttcaatctttactatcaatccaccaattgctggtatgttctttactgtaaacattgatgcttcagctcatccagaatttaagactaaatttgactcagacccaactaaagtcgaacagcatatctacgataccgtcattagtaatggtgttttagtggttccaggtatttggttcatcactgatggtgaaactacccctgctcaaccaaaggaatctaaagagatctccaatccaaatattgttttctttagaggtacctttgctgctgttgcaccagaaaaattagaaaatggtataaaaagatttgctgatgttttaaaaaaaagaatttgcacttaattaaattctagatattgattattaaaatgataaattattttattctattctattctttcttcttttatgtatgtatgtatgtatgaatggatattgattcttgtagcactttgccaaatttaataaaatacatgagttcttcttatagtcagaatattgttatttcttatagataagttattagcattgataataatataatacaaatatattgttgtttattctttgcaaaaaagaacaaacaaatataaagagcttataagtacatgtgtacacactcactcactcactcactcacaatcatatatatatatatatatatatatatgaatattattcattatatatttcttgtttcttctccattatgttcttccatagtatcaagcatttcacaatttggatggataacataaacaatcttacttgggtctacttgaacttgaacttcttcgtcttcgttatcttcactcatattctctctcgtaccacgaatttccataagaattctatctttaactaatctttttaatactttatatgctaatttccgttcttgccaatattcgttctctgaacttatatcattttctctttgtaaaagataccattcaacaatctcagttgcagtcatttctttaccatgttgtctttccatattagcaatcttatgaacaagcaaattcatcattgatatatacttatcatacgtgattgtagttttatgtttgtgattattgctctccgattcagcattggacttagtatttgaaacatcctctgttgttggagacgattcgtcatttgtgccaatgacattttcagtaggagactcagtgccgttttcattctcgtcatcatccatttcaatatcatccacatcaacacgtataatactttgtcttaataaatcataggcttcagctacaaaggcaggtgtaatttcatcaacacagttagctcttgcaatggcttcagataatctgatcatactctctaattgtcttacagtaattctataacttgacctgctgtagccttgagcatcatcacttctcaaaattttatacttatcaaccaagaatttacgagcttccttcgttaaaacgggtttaaatgttctagcatacttgatatatcttcgtaattgttggctagtaaaaggtggttgaatagcatcgtctcttttcatatgtagattaacgatatgagatgctaattcagtatcaatcttttcattacaatcatctaaaataacaaagaataaatcaaaacgagacataattggagctgtcatatttaagttacctctaagagataactttctgttataacgcccacctattggattggcagctgctaagatagatgttcgagcatttaaggttgcatgaatacctgctttggcaatggaaatagtttgttgttccatagcttcatggatagccacctgatcagacacatccattttgtcaaactcatcgatacaacaaataccattatctgccaacattaatgcccctgcttcaatagtgtagtcaccggcttcttcatctcttactacagcagcggtcaaaccagctgcagaagaagccttaccagaggtataaactgctcttggtgcaaaattacaaacatatttcaaaaactgtgatttggatgtagatggatcacctacaatacaaatgttgatatcacctcttaatttaataccttctacagtagtcttatggacacctcccaacatttgtagtaaaatcccttttttaattacttcatgaccaaaaaccgcaggcgcgatggatcttaccaatttatcataaatatgttcatctttgaccatttcttttagttcattgatttcatctgcatttaaactatttaaaaataattcctgatctttctcatgatcctgatatacactgtacccatataaatttgcatcaatatttaattcattttctgtgtttgaatttttttcatccgggtcattattattgttgttaatattagaacctacactaacaacatgacatgcaagaaaactcattttataggtcaaatcacgaacacctaaggatcgtagaccggtaacaccactattcaaaccttcagatgaccttgcaattgaacgtgtatctcttatactacttggtttaacacctggaagacctaattgtgatatatcaggaaccacaatgtctgtacctgtgaatttacatctatcaccaggtttagctctttccacacaatctcctcttaaaataacatctaatgtacggggcattgaaccatttgggatttcatttgcattttcttggattctaactttttgccaatcaaggaaactagatctagctacatttagggtccaaaatgctctattttcacaggttggatttggacaaaatgttggttccgtgtacttaaaagactgttcaatgttatcaataatggcacgacatacatcacaggtaaaactggctttatacaattctggacgcacttctgaagttctagttacagtacctgatatagtcaatagagtaccaattttatcggatttcacatcacgaattctatggacaactggtaaattgaaaaaactaatttggaatacacgttcagcttgatccacactggttgttgaagttgttgtctttgtttcattggtcgaagtagcaccattcgacattggtaaagaacttggaatttgtgatctcatggaatcaggatttccttcctcggttttgtctccttggactgagtctcttgttaataataattcagaagcatattttcgaataactcttttaagacctttaattaaaaatggcaagaatctataatattgttcagagatagccattgctaatgcaccattttctctcattgaaatatgttgataatcaatgtaaatagtacttaagtcataagcattcataaattcaatctgtgctctatagattttatcagattgaccggtttcctcattggggatagaaaaatcttctaaaaattgttcaaaagcttcacgcactttttcaccagtaacatcatctacctttctaacatggtttactgttcttcttctaatcccctgcataggtaaatcttcaatatcatgtggtgaggctggggttccactttgtggatcattctgggaactaaattgcgacaagtttggattatttagatgtgattgtgaagagctaggaaactgtactcgagaattgatatgagattcattttcaaaggccgaactacttgcaaaagtaccaggaattgaagatccaggcggggatgagtttgaaggtctgtgggcaggcgttaaatcagagggtggtggtgatgacatttcactatgctataatatagtttttctacgtgtattgtgatttgttcgaagtttcaaagtcgatttgtatctaacagactaaatatgatatgacatggcactacaagtataaaaatatttaaacgttgttcgttgatctatgtttaaacttgttttttaactttttctctctttccattttttcattttttgtatctcgagctaaaaaatgtattatgattttacccaaataggaaatgttattatcattaatagaaaattttaatcggtgtaaacaagaatcaaaagaatggtaacatatggcaataaaggtagtgataatgacaacgagaatagttgtgataaaagacgttgtgtcaactgattgaacaatcaacagctataaattctataaataactaatatatgtatatgtataaatttgtttgcttgtagtatggatgtagagaattcaataattgatcaaatgaaaacaagaataggctgttgttaagtaaatataatccactgagtattggtaagctttaattagtttaaaagaataaaataatagtagagttaataaatatttttttcttggggatcaataaaacaaaattaaggtctgttcatagattgtatgtgatgagagtaaacggtaataaaactcatcagaatagttcaaatgtattatacctggagaaaatggtgggaaaaaaaaaatcattaaaaaagtaactcttataagatataaaaaagatactatttactaaagttacttacatggtttattgtaattcaaattgccttccttaactgtcaattagatacaaaagtataaatataaatttttatgtatattgtacgctagtgctttagtggagttgaatcgagacatgaattttattcagtgtcgttgagttattgaagtaaagagtggtgagaattataaaagaagtttataccgaatttgataaggtttaattttatgtgtataagagccgtattttgtaattaaaatttctgaaaatttttgttcatagaaattgtcgttggcaaacaaatgtttaattgtatgtctaatatgataaacaaaacttttaaaaaaagattattaagtgaagattacttcctaaaatagaaccaaaacattcaaattattttttaaacttttctaaacaataatggttttaattatttctaatatatatatattttgaactgattttattatagtaataccacttgataattatattagggatacaaaataattttaccaagaatacacaacatatgttcaaataatgaatacataataattttcagacttcagaatttttattaaatcaagcttttgtatttcaaaatattgtatatttaaaaaaaactgatatattataacattatttacaccattttaaatagccagaaaaccatcaataatgtaatctacttttatcttaaatctgcgtttaaaataatatctatgtttttatataacactaatttattcatattatacaaaaatacaatttccattgtaaatgaaaactaaacttcctaactgtgtgcttttattatttaaatttattattattactataaatggataacatgtggagcaaagagtttctgctttattaaaaattgttacataaggcttttatgaaaaattattaaaggatataatgcaaaaaatactttaaaacttaaagacaataacaataaagttatttcctcgtctatcattatataatgcataaattgtgactgcagaaattaaaaatatattatatcaaccttccccccctttttttttcaccactgggtatcaataaaaactccctaacaacaaatataagaacaaaacaaaaagaaattatgctcactggttgagcactatatgtatgcaaactgattaaaatatttcataatagagagacgaatatcctattatctatatcgattggacagattttataactaataacgaataaacagaatcaacataaaattatctatgttttcttttttcttgcattccaagcagaactcttacagtttcctgtgagtgcatttttgggaaaagtataaccagccattttccagcttgtcaaattagcattggtatatgcattcttatgagattcaatataatcataagtaggaaaatcctctggatcacatgtagttgatattgcattcttcggttggtaaatcctaacatagtcaatggacatagtaacagggaaaaaaatttggggccaatcaatataatcccaactattagatatacccaaatttaaaattattgacattggctctttactaattgttctccagccaatattcccattcggatgtaaggctgtggaatataatgtaaatgtaggaacccctccaacactccactgaacataaccatctttatcatcatttaaatattccataccgaaggtctgataatatccaccttgtggaccatattcataccatgcagtatttaatgttgtcacagcagatatagcttgctgaaatggtccaccagtataactattcatcgctgtggtgctaaaattgtaaatttctatatattcataatcaggtatgtaccaaatatcaaaaggcgcaacttgtaaagattgagatgcaacacctgtacccaaagcagtatctactgatccttcaagaacatcgatttcaggggcaccacgacctataccaggagatggagtatcttcatcatcacatgtgcatgcactcaacctttgacccggtagatacgatataccatctggagaactttgatttggtgtaataccagcatcacaagaatcatatgagtaaggccacaaaccttccgtggaagctaagtaacctggtctagctaaattccccatagtccaaataccgggccataaacctgcaacacgcccataattaggcaaattagcagatacctcaatagatccctgtgtaaagcaaaatttattccaactttgtaacatacctgatctataaaaaagattatgatttttgtaggcatccattcttaattttaaagttccattagaagtagtggtagaatctggggaataccattctaagtcatttgttgcagcataatgaatatttggagaggtccagaattgatcatcaccttcataaaatgtccttccctcagcattaaattcatctgaaaaaaccaattgccatgtgtcaccatttttagactttttagtatatgctgaagttggtgtatctggatcaataagtgaagttctaatagctgcaagttgtgggtactggtactctgttagatattctacaaaagtgacattttcaggtactgaatcagtctttgttgaatgattcacataacctgtgaatgtcaatgcaggtaagacaatgaatacggccattgcaccaagaaacaaggtcaataatcctgcaaatcccataagtgattttgtattcatatgtcttaaatcttccaggacccttcttctatctaatttagcctcttcttcaggatttgggttatgtaaataatcgtctacctccttttcatccatagacagggggaaaagtgattttggatatcctccaaacggtgaaaaatctttttcaataaaaccattatttttcgaaccaaaagaagaagaatctattgtagaagatgaattatgatttgaactttttgtgttagtttctgtcggtgaaattaccactttattaatttgtagaacttgttttggaactgtagaactcacttttgggtatctgtcaaatggtttcggggtatggataaaactattacttagtggtatatcacttataagtttggatgtcgagatatatttacctggatttggaggggagttttcattaccaatagaatcattaaactttgtatttgtatttaaattagatttagaatttgatgaagacgtgtattcaccatcataactggtattgttaacatttctgttatttccttcacttgtcctgtctcttgaataatatcctctatagtctggataggggttacttgcttgatatcttgcagtcccatgtgtgtgtgtaggcagtaaagaattttgactatctccctgactgtcagggaatgattccatgaaatcatcacgctgtgttgtaaacggattatttagagatggtgactcatcaaaacgacctgctacctgtacatttttgagttgttcatcgtcatattgaacgttattttctgaatacggtgttgaactcgacgtaaattcttccagactagacgatgtgttttcttccataacatttcttgaagcattatactcatttgttaattttctcataatgacggtaacttaaaaaaatgttgtattcgtagtcaataacactatgataactaaatatcaactttgtaaaaaataatgaaaatttcgacagctgctgatataaaatcaatctaatatctattaaaaataggtttctaaagcaaagcaagaatattttataaatatgttgtactctattatttggctgaattgctaatattgtaatattatcttgtaatcgatcacaaatactcaaccaataaaaacaaaataaataaacaaacaaactgaaaatgcactgttttgattgctagaagtttattaataaaggatgtgtgtaattgaatttcatgtaattagaaaacgagagacaaagaagctaagagtgattttttcttcacactcagaatcactgaagtgtatcgtattctgacaaacaggaaccaaaaaaattgcacaggggaggggggattgggaaaagagtctttaccttaaaataattcctagtacaagttaacaaagttgatcaaaaataatgccacaatggccaaggaagggataacagaagaatgctatctgttacaacaagaccaactgtcttctaatactaaacaaaatgcagaattcaataaagaaaaaaaaacaaagtaaaaataaaagaagagtctaatttgatatgaaagtattggttgcgaaaagccggcctttaaggtggaaaatttagaacaaatacaattataatacaaaacaatttcttgaaaattgacaccatttcctaatggggtaaccgagagtcaacaatgaaaatgtcttttagtttgggaaatttacagctttttcccctttggggtatttgatttctgaattaggaagtaagaaatcacaaatgattcccccaaatgggactactgattttcttcaattgtttttaaaatctacatacttccaaaatcagaaaaagacgtcatttctcaaaaagaaaaaaaaaacaaataaaaaaaacagtattgtgaaaagttataaaagataaaacatatacttatagtttcgattgatacatgaattagtaaataaagaaatacgtgaataaaataaaaacaagtaaagagattatgtatgacaatagcatgctctgtactttcagaaaatacgaaaaaaagacagagcattgcatttaacctatccaatttttactattattttacaagaaaatgaaaaaaataatggaaaataaaaagttttttttaaaataatataattttcttgatctaagaattagttgtataaaacaaaaaaaacaataaaaatcactagagttgactattgagtatatccataactctttttctctcccttatcttcgaccatccctaaaaaaactgtttaatgatccataatcataatatcttctaaatataattgaaatgtataaatcgttaagtattttttttaaagattatataatattatcataaataaataaacaaataaatgtatgtatatttgtgcttaaataagtaaattatgcatcttctattatagaggtccctcttggagatttgataagtgattcattatatctactcatttcatcatcctctacctcttcaagaacagggctagaatatcttcttaaggagtgagaaatgctagtttctgaatcttcactatcagatacagctgattctactgcagaactttcataaccgctgatatcattatcattctcattatgaaaattaatattaatattgacaacgttatttgaatcacttaccatcgcatctagcttagaagccaaaagagattcttgttgtaatttttcttgctttcttcttcgttcttcttcaactaaacttctttgatattcaatatgttcttgaagtgtcttttctcttttgattcttctttcctcttcttgcttcctctttaattcttcttcacgtctttcttgttccttttgctccttttccaaagcaagtttcttttctaattcttgcttggcttttagtttcatagtactttccgatttttcccgtctttctttctccaatgcaattctttcagcttccttttgcttccttattctttcttgttctaatctagatatcctttcagtttctttaatttctgcaagtcttttcttttcatcttcttgttcctctttttgatattgggcttctaataattctttctttgtttcaaagataacatcaatttttaagacagcggtattttcattaatcacaccacagcctactacttggaagtccgatatgaaagagttaaattgtaatttttcattgatgttatctcttgaagaacaaacaactaattttgaaccatcgtgggataattccaatgagtaatcttgaaacatttctttagctaacttacgtccaacagcattacaatcaatttgatcaagaacagcttgttcatctatttgattggctacataatattgatttccaaaaaaatcggtgacaatacgatatgttggttttatggtttgtttaatattgtggtattgttcttcaatggcttgatagtatttgttgtaaggtaattgtttctggaatgtcagcaatacaccttttgaactctctttcgtggttaatataactctatcgttactattacatctattgtttgcaaaatcttggaataaaggagcttgccttaagatagttttttcatggaaaacaggtaactgctgaaataaacatggactgtataattgactgtacatttttgtttctttgtctttgttttagtttttttttttttttttcttaaaaggaaagaaatataatatagtatttcttttattttgtgtaaaccaggtaatctagcgtataattttttgactagactattatcgttattattgctgttgtttttagcgatgatagaagccaattggaaaacaaaatatttcaatatttaaaagagaaaggaggaaaaaaagacctatttaatcctctttctaatttaatttaccttatttatatgttttttgaagatcaatcatgatacttgtgtgtcattccaggaagccttacgtaagataatttaccaccacttgagctaaaaacccttccaacataacgattagtcagatttaatttagtgttaataaaacataccagcctgctttttaaagcattttccagaatgttctatggcgtacagaaacttttctcctcctcattttcccttttactcctctacgaggaaagaacctggtggaatcccatagaaagaaaaaaaaagagaaaaaccacggaaacttttctttttgatccacggaacattttctttttttctttcttttttcccccttttgtattcgggagaacaaaaaaataaaatcttaatctcggaccttctagaacatttctcgagaaaaatctgtgcgatgaaataggtttcgagaatttgaggggaagggaagggaagggaagaaatttgaatcatcgttgacactgtctttttaaaaattctcactcaaaatggcttatcaaaaaaaaaagaaaggagcacccccacaaaaaatatttttgaaaatttatgacagccctatcctcttgttactggaagtgtagcttttttgttttttctttcatttgaccctaaataatattaatttaatcaagaaaatgtaatttaccatatagttgcacaaatgagtataagctcatcatccaactatgcttctgtaattacatacaaatatttatgttcattccattaaaaatacctgacaaatgtaatccttacacttaattgttgttaaaatgttttctttgatttttttttgtccttttaaaaacagcgcctattatataatgtaacacttcatccagtaaagtaatccattaagaagcaaagcacacccctccacataaatagtctaactaaacctcgtaaccactttggacgtatcttgtataaaagaataccacagttatcaccaaatgaatcgtttttttctgcatccaaaccttctccacgtttaagccattgtcttgcagggcatcccttccaaaaattccaccatttaaatgattggcataaagacattctttctaaattcttgctcaagggtcctcttggtccatcaatgtatctccattgaacaggacaccatttttgtcttggatcattccatttcaatcgtttattgccccatgctcctgcatatcgtagccattcagtccccatatctttttctctatctgttatcggatatatgtcttgcccactgtattgatatgcataataatttaaaacaggatcccacattggtccacgatctgtaaaatcacttaaaggcatgaaaaagaatggaacatcatgtgaatgttgacccaccgtagcataattggcatgtgttccacgcgcactaaatatcaacggtctccaaacaatcgaattctgtatctttccatcaacatgtcttagttttttaactttttcaattgcatgaaaatgatacgcacttccaccaccatgagcactcatccatagaaactttggttcccccatatagaaccttactagactgtgttcccaatcacctatgtgattgccccagggcccatatcccattataaacggtccccaattaaaagggtagaaataaaaccaatatgcatctacccatccattacctttgtcaacaataaataaaactgctggggctcgtttaattcgaccagtaccgtattcaggtcggaatccaaataaccactctgtattatcattaaatttttcattagatgtcataaaagttccttcactatcaacattcgtaaaggttccgttctctagggatacattatatgactgtttaaggtcatgcaaagtcaaagggtgtgagacattaacaatgaccccattcgagtcttcaatatgaaaatgagtgacaaaatccttaatatcagctggccaatatctttcttcactatataaatgcacaagggggcagttatctaatatatattgtggaacagattgtaatcttttcggtatcgactttgtttcatctgtaagttcttctggggaaagaataggtggaatatttaattcttgagtttttaatttaaattcatattctatctgctcttctgatataaacctttgatgaaatataagatttaattgattttcctttgttcttgcatttactgatctatgcagacaccacaagtttaagaagaaagtatagatcaaatacatatcttgtatttgaaaaaacctcttctttccttttcttactttttatttatttgaatccagatttatctaacgttctgagtaaggcgtaaaaaattctttaaagtgattataccatattccattcaatctttcctctaccttgtctattttcccctttgtgttaaatataatttataaatatgaaaatcgtaagtttttttttttcctttttcttataaataacttgtaactcattatggtatattttgaaaagaagaatatttatatattaaagtacttttttccttcatgaaataaaacattggtaaattagtactttttacgtcgaaatagatcatatacaggtataaaataactacttatccttgatatagcccctcaaacgaaccatgatggctattcttgtatatttctaaaaagtttgaaaactcttcaatggtcctttgtccttgtaattttttacaataagcaatggcttgtaaattatcaagtgcttcaattgttgtcagatacacgtaataatcaacaatatgttcccttatctgataaatatggtcgttcttagatcgccatgctctaccatatttattatccattgagtgcacacattcgttattcatagcaggatttggtgagaaccattcaattataacatcttgaatgtcattaatcgatggttgcatatgaaaacttaatgaattataattgtcactattcgagacagaattattatcttgaaaattcttaattgaaactggagttgactctgttattgaataatctgaattaatatcattgggcgattctgttgttcttgtccctccatttaaagataatgcagttgccttattctgcaccctttgagcaaaattgctctccataacctttattcgttttgatggtattatatctaattcattttgtttcaaatactcatctacagatctttttagtctatgttcaataaaaaaatcaattttttgatttaacttagattcaattatactatctactattttctccattttattttctaacatatccatttgtcttttcaataaaatacccacttttgttgtaactaattcatcaatcatatcttttaactgctcttcctggtctgactggtcatcctcttcactatcattattgctctcttcttctttcttttcatttccttcttgtttatcttcagtatttctgtgacgtgtctgtttattcttctttccctccgtaggtggttcctctgaaattttttcctcatcttcatcactagaatggccacttacactgaaaactctaaatagtgaacttgatttttctctttttaaaatcggtaaaggaactctgtgatcatcatcactattacttccactatcttctaattctataagggatgtatcttttcttctggaacctttttttttaaaagatctatttgttgacaaatattgttttatattagtaggtgtagttgcctttaacttagagttcaatacttctacatatccattcataatcttatctatctccattttagaagatgacttcaatggaagatatgcaaaaatatcagataataaatcagtaaattcttgaaaaatgttcaaagtttgaatttgaataaatttaaaattttcttctcttaattgttccgaaacttcatctatatttggcgaaaccttcaattcaattggagctttcttaacaacttcttcagtatttttttgtggtttgtctaaaaatctcactggaaattgaaacatatctgaagagccactttgtttttgcatgcttttaccttcatcaaacgaattagaccgctttatatccaagtttaatgatttcacattaacttccggcaaatcaatatttgataggaaagaaggttgatcaactaatccctcgtataaattgaaaagactgcttttattaggaccatcattatctagtgtccagtctaccttaaaaaataacggttcatggtcttgcaattgaataccatttaaataatattgtaatcttggttctttaaagataggatgcataaaaatatcgtgctctggaaaaatcttataaatgactggtaaatccaatacaaacttaaacctaattacttccaacattttaataaatcttttagaatctgttgataattggttccaattacccctataaatttctatttcagggaagaccgaggaaattatatctcgagatgggatgttggattctgttccaagtttgattctcgttgtttcacagtatggattatatccatttaaaatgttcatataatcccatggcactctatcattagaaaacagttcttcaaatttaccaaaatataaattagatgtccatgtgggatatactggatacaatttttcaaaataatattttttcttgtatggaatatcacaatatttaaacatgttagaataatagctaccaatcatcgattccttaggatactttgattcatattttgatgataatagatataaattcgctacttcattaggatcatataaattagggaagccttcacctttagagaaatagcggataccatagaatcttagaaatagagaagctgctaatgtcgtatatggacataggaacgggttctcgtgaggcaataaagctaaaggttttctaatttcttttgaaaaattgtcaagagataaatcataatatagtatagccaaatccttcgaatactttgtgtcaagaataatttttgtattatttaataatcggaaagaacataatcttatctgtgatctctctttaaaagttaatcttagatatgttgtaatatggaaatcaaccaaaaacttcaatttttcattagctgtcttaaaaacaattgaatttaaactcttggtatttgagttccatgaatttattgatattttataacaaggaatatgtttagtgggatcattagcatatgtatgaagttgaatcatgttgaagagataatcttcatctagtctatttcttttgatcatcaaattaccatatatatcgcataatttagatatgaagataaaaccattaacccatcgagacaaaacatctgtgatactttcatcctcattatatttgcttttaaacttctgtattacattttcgattaaaaattgatgtactagctgggatgatatgggcaagtttttatatatgacagcttcatcatcatttgatatatcgtcgttttgttgaaaatcatcattattatcagtgttattgttatcagtattattattattgtcattatcattatcattagacaacggttgaaactgatctgcatattttaccaataaatcattatttttacaccaattcccataatagatcaaatatgttttatacacagtagtcaatcgttttgtggtagaattatggagtctttgtagcttttgttttctagtaatcataactttttctaacaaatttctttaaatttcggatatcaatgatacaatatcgttatgtaaatattggattattttgagacactagatgcttttacaaatcagaaaaaataaaaaaaaacaaacaaaaaacaaaacaaaaaacaatacaacatagatatagatattgataagaaattccaacaattaagagattccattagtattgttagcaattgataatgtctgcccaagaaactaacttgagcactaaaagtacattctagctattaatgaaatgtgcattatgcttttaaggttttgctttgtttgattcttctttttctttttttctttttgattaaacaaatcatctgacacgacaatatcattatacacgtttaaatttctgtttttttttttttttttttttttttttttttttttctctctatttctttgtcttgaatatatagaactgttttaacataaggaataaaaaaatacaaaataacacatactaacatatatgatgctggtttaaaagggaaagggtgttgattagttgatgattaaaagatttgagggaaagatatgtctttaatagtcctaatacacaaatagcaaaaaagaaagtgaatgaagtacagagtctatttaattaaaaaagtatgcgtacacaaaattatacaaagtgtaaacaagaagaaagaatgtaatgaaaggtacttcaaatacgcaaaatctttactcgaccaaaaatataacaagaagaaagagaaaaaaaaagatatccctacttcgacataacttcttcttttatttataactttaatcagttaatataaactgttcttgaagaacttttcttacaataagtgcaaacgaacaaagacaaacaagcaaacaaagttctacaagatgtacatgttaccttgtttttttatttaatcaaattaatttggggcctttaaagaaaatcacaaatttttcttcaagtggaacacataagcatgcacccacatgtatatatgaatatatagcatgagccgctcaatacgcgttatttaacaaaaaagtatcaattcttgatttaatcattcttcaccgaaatattacaaatgcataaaacccatcaatttttttaaaaaaaaaagagagaaactgatcatattgtttgagtcccgaagtctgtgggtggacaaacaattgattgaacagagattttaaaattatccatattttctttcttcctgtcaaaatcaaatttttaaaagaaaagagaatcgaaatgaaataaaaggcataatagtcaatggagtaaaagaaattcttacttgaggtgtttttttttgcccaatgcagatttcaagaaaatttagtcttgttgaaaaaggaaacagataataaacaaaaaaacaatactaaaaatgaacttactatatatgattagacacgaataatatgtttagggttttattaattgaaatagtcatccaatatgtgtgaaacatcaatgactatcagaggattgtagggcaaccaagaaaaaaaaatagtgaataataactattaatcttaatactatcttatgacactgaacaaacaatataaaatgagggtttttacggcagagaatcaaataattactatttttcttccctttaaattcaataaaaagaaattagaagaaaaaaataaaaaaataaaaaaaaacactattgtcgttcaaaattatattcataaaatttttttataataaaaccacgaccgccataccaaagaaacaaaattaattccctcggacaaactggacaaagtttattttattgtattcttcttgtttttactctttttgtttttgtcatgcggccggctgtgctattatttttactcatagaaaatttttatagctattgttgtcctttattgaatttccccttttaggctatatagttttatacacatatatattctcttaccaattacaatagttatatttttgatattctttagaagatttaatattcatttgttctttgtctttggttttgagtcgtatctattgttttctgaatggtaagtccactcttttttctttttatatccaaaatttcctatttttgatccattaatttcttacttttttgttttttgcctttgttattgaaaagtttttgagatatattcatgaattttttttttttgatatgtaaaaatttcactcaattttattatcgatccaataacaatagcactaaaataatactatgtgtctaaaaaaaaaccataatagaatattaaatccatgattaccacacaattatatataatatatatgataagagtatatatatatatatatatatatatgtatatatggagatatgtgtttggcttttttattttcttcttttgcattcgtacacgccactttctgttccacctttttgcttctttgcttctgcctttctatttcttttgacttttttattaaagataccacaagcccgagcagacaagttagttaaaaataatatatatacccgttactggactcctatccagttaaatcccttttttttttttacatatacacaccgtcttttttttttactttaatatcattttctcaactagtacacgcgcatacgcatttaaatatttagaataattttttctttgaaataaattatgagtgagttacattctgttaattcgttcagttctggacaatcaagtttatctttagcctctgatttggaagctcaaccacaacaatatattccaactgaaaatgatgacaacacacaaaataatggtaccaaattgaaattagttcgtactgaaactgtcaaaagtttagctgacatgggtgttactgctagagctcctctaccggatgttaatgctccacaaacttctggtaaaactgctattttccctgaagaatatactatggaaactaccactggtttggttcctgttgttactttacaatcccttggtagaactgctacatctgtatctcgtattagaacaagacaaatggatagatctctaagtattcgttcttcatccaattctaatcatgataaagaggaattagatgaacaacaacatgacgcagaagagtctagtagttcaaatgccatagaagaagaagaaggcttagatcctgaaattgaattcgtgacttttgttactaatgatccagagaatcctcacaattggccactttgggtccgttggtgttacactgttttattatctacattggtcgtctgtgttgcttacggttctgcctgtatcactggtggtttaggtaccgttcaaaagaaattccatgtctctatggaagctgccattttatcttgttctttaatggttattggttttgccttaggtccattaatatggtcccccgttagtgatttattcggtagaagggttgcatatttcacatctatgggtttatacacaatttttaatataccatgtgctttagctccaaatttgggtggcttgttagtctgtagatttttatgtggtgtcttttcttcatctggtttgtgtttggtcggtggttctattgcagatatgttcccaagttccactagaggtaaagctatcgctttttttgcttgggcaccatatgctggtccatgtattggtcctttggtgaatgggttcgtctctgtatctactggtagaatggactacatcttctggttcaacatggctttcgctggtgttatgtggattatttcttctttaattcctgaaacttatgcaccagtcattttaagaaaacgtgctgttagattaagaaaggaaactggtaatccaaagattatgaccgaacaagaggcccaaggtacaagtttcagtgaagtcgttagaacatgtttattgagacctttgtattttgctgtaactgaacctgttttagttgccacatgtttctatgtctgtttaatttactctctattatatgctttcttctttgcattccctgtcatctttggtgagttgtacggctggaaggataatttaattggtttaatgtttgttccagttttaattggtgccacttttgcattggcattcactttctggtgtgaaagtaagtatatgcaaatcactcaaaaacgtagaccaactccagaagaccgtttattaggtgctatgattggtgctccatttgctgcaattgctctttggattttaggtgccactgcattaaagaaggttatctgggttggtccagcttcttctggtttatctttcggtttcggtatggttttaatttactactcattaaataactatatcattgactgttacgttcaatatgcttctagtgctttagctacaaaagtgttcttaagatcagcaggtggtgctgccttcccattattcacaactcaaatgtatcacagattaaacctacattggggttcatacttattaggttttatctccactgcaatgattgctttaccatacggttttgcttactggggtaaaggtttgagacacaagttatccaaaaaggattactccattgattccattgatgcttgagtgactctgtcttttattgtgtgcctcttctccgccttttttttaaaattcttactactgttgagttcagttgttacttggggaatttattctccataatacatataatatggcattcaggtagttttgtgatagaagcttaatgaactttattaacagttataatacagtacatgaaaagaaaaaaaaccaaagaatattttacattatagatattgctcccattgatattcttcatctttgaacaagacaacgttattgtcacaagcaatcaacgtacataaacaataggacttttattgttattattttatatttcatttttcttttcgtttattatgtgtttttcttattcttaagttatcctgaacttcaatcaatcagtcatttaattactaattatactcattgtcataatcattcaaataattttttttttcaatttagttttatacagtgatatcacattaagactattacatatactatatttagaaacaatcaataaataatgcattacattttatattatgttagagttattcttcattattattgtagtagaaaatttcgtataagtacatatataaataatagacaaattttctgtcctatgtagagaatattattactattatttttaacgttaacattaaccctggagttgacaaattcaaagataatatcttgatattatgaacattttgtatctgagtctattgttttttgattttagaaagttcaagattgcttgtttcccccaaaatagtaatttttggatattcatgttattctaggataaatctgatttaaaataaatcaaaaaaaaatcaaaacaagtactaataaacactaagactgaagaataatcaacgatattgtcacaaatcaataagaaatattgtaaacatggtccctattcgttcttgtatatattcaatatcaataaatatttgaacaaacatctttttcaaaccatctgaactcactatttttaaattaaggactgtgaaaggttgctttgttaaaactctcaaatcttcctccccaacgaactaatttagctattcatatccaattcagtaatatttaactgtctttaaatgcttgttttctgtttgctgagtttgtaaagtactttttcataaccactttattagatgttaatatcataattttctaaatgggcttattattaagattttcaaaaatgtcgctaggaactagttgattacaaaggctctatgcatcataatgaactaaattttcatttatcatgtgcaaagatataacttagcctcatacatgtcgattttttaaactgtccatgttttaacgatttgaagtagtatccaattaacgtatgagtcattggagaaaggtaaacttcgtttgttttagattttaaaaaaattatatggagctaagtatatcttagtatagtattttaagtatttaattattcttataatcaattaatgcatatttgtataatataactaataatttttcatatttttttctccatattactccatataatatggacaaaaataaagccaaaatacaagtactctcatatttaccaactttgttactgaatacaatttaaattccaaaaaatgatgtcttttattattttagaacgaaaacttccattgtttggatgaatttttaattaatttaatacacatacatacatatatatgttgtcttcgattatggatgtccctagatataaaattatttttacattaattgactttaaatacatttacagaataataaataatattactgcaaatttaaattttaaacatcttagagaaatataaatcattcctaaaacttcctaggtcacgattcttagtgaaaaacgtgttgatattctcaacagcttaagttataagtaataaaatatttacatctagtggaaatttttcaaatcaagatattctcttgaaatgtttcagtctgtcattcgttctcatttttgatctctctatcatgcaatttatcaaatgcagaattcaccaaatcttgacccaatttagaacctgcaccccatataattgcattacctaatctactgccaaattgatgtaaaaattgatgattatgctttttcggtggtttttgtgattgtagttgtggtggtgaagcaatttgtgtgtaattgctattattgttatgattagaaattttttcattattattatattgttgatttggtaaaggtgcagatggtctatatacactattattattattattattattagtgttgatgttataactatttaatggtttaacataatttgaagggaaaacaccaatttgaccattgcacctacctttcaaccagctttcagataaaacttccaaaacttcaattttgtcgcctacattcagccttaaatcacctgattgttgtgattcatatggataaattgcttcaacaaacttctttgtcttcttgatcttatttggcctactagaatcctttggtaatctattattaaattcatcataaaaatctttagagataactttattttctagtaaaaagtctaattcagttctaatgttggtcaatgaacgattaattaaagcctctgacattgttattattgttttccttctttctttattaaatgactattattgaaaaagtagtttaatacaagtgttttcttactacctattgttttctcgaagtttatatgactaaaaaagaggcttggtcacagaagactacttgttacaggtatcttttccacatatacatatatagcaacatcatatataccatatttactgtatgtatcatagggcctatgagattcagcatacgtatatataaatacatacacatatacgtatatatatatatattctacagttcttgttattaaacttttatcgatgcaacctacaaacaaaaaaaaaagaaaagaaaagaaaaaagtaatcaatttttttacttcgcctcataaatttcctcaagcaacttaacaatgaagaagaagcaaagcacaacaagaatatatctgtggatcaaaatattaaaaaaacatgattcattctattagtatgattcttggtgtgctaataccttggaaaaaaattaagattcgtaatatactcaggccttatgtattcgcatatcaatataaccatatatatatacacatatatgttgcagtaaatcataggtacttacaagaacaaaatgaattattaaattttaagtaatgattagatcacattagatcagagtaaactaaaaaaatattttctacgattttgcaattttattaaaatataatattttttgttatgataaaaatacttatatatcccatttatttgtatctttctatttactttcataattttatttcagtatcttcaccttcgccttcgccatcctcattattctttgatttcttagttataccagtcttaattaataattgtttgatttcatttggtttataaatcttttggtatacccttttagaaccgtttccatcatctggtttcattttaattgtagcaaactccaatctatcatatgtcaaagcactgctatcggttgtttttgatagagttttcaaagcaagttctgtagcttcttctaatgtgatatcatctttataatccatctgcaaaagtgtttgagctgcagatgtattggcaccaacactaatagctttccaacctgtataattacctgatggattggatgtatacaattgatacccatatctatcatcataaccagcataaataaatgatacaccaaatggtctcagcccaccatgttgtgtatacccttgttttatatcactcattcttctgactagcatctccacaggtatatcttcgttgtaagtcaataaataatcttgtgcatggaatcttgcagtatttataaggatctctgcatctgctgtcaaaccagccacagccacagtgattttgtcattcaatttgtataacttttccgtggacgtatcttgctccaataatgcactagtcactttcctttctgctgctaatacgataccatcctttgccataatacctattgctgtccctgcatgagaaatggattctaaggcgtattcaacttgatatagacgtccttccggagaaaaaatagttgttcttgaatcgtatcttcttgaacccattattgattttgttttttaattttaattactctggaaggaagaaaaaaataactatgttttgaatagtggtgtttatctatttatgtctaaaatattatctttataagagtacttgggtggcaattataaaaaaacacagaagcactaaagaacaaaaagaaaaagatcaaaattttcacgcaaactttgtaacaagaacttgttttcctgttaaaggtctctaaccacaacagtatacacgctatctatataagcagaaaactttttgagcgctgtaaaggcattcttttattaaaaatcgcacacacatatatacgcatacattcaattgttattcccttattacttttgcctttgaaacttttcgacaagttctcacacttaaacatctcgtgaatagttacatcaaaggaagtaagaggtatgggtgttgtgccctacttttattctgaaccctaatctaactccacgctggtctgtatattattattactcttacttctactatattcaatgtgtgcatatatgccatacctaacctctgttattgtgttgtttgcatattctagataagatgtctctttccattacaactttacgacaagaacaacaaaagcagaaagtagagattgacagtgttattctgatctgatactataacaaaaaatgtttctcaatgttgaagaaaatactattctttgtccagcattctttcactcttgattattatgaagggagacagaggggagaaaggaaagaacattagagaggcttttttttctcttatcaatcaaataatatacaaaggaatatataaatttttgccaacatttcgtttaaagcctttatgcaacatatagcttactttaggtatggttgagaatctacttctctattaagagtctttgtctttgttgctttattgatctctctatttattttcttttttttccttctcttatatatatatacatcttttaggcattaactaattatatgatgtccttggtaacaatcttattttcgtaagccatctttttctccttagatctttaaaatatatttattaagaaagcataagataatatcaggaataagttacttctaaacagtgccttaagtatttatacgactatatacttcttaaaatgttcaaaacacattcttcattcagaatttttcctgttactacttcctctcttcatatctttaaaagacgtttatccgaattttataatctttcggcaaaggatataaaggggaaccttatccagcttaatcaattaaaggggcaaactgtattaatagttaatgtagcctctcagtgcgggtttaccaaacaatatgaaggtttacaaaatttatatgaaaaatataaagataaaggtttcaccatcttagggtttccttgtaaccagttcaggagacaagaaccaggttcaaacgaacagattatggattttgtgtctaataaatatggggtcaccttcccgataatgtcgaaagttaatgtcaatgggaatcagacagattctgttttcgcgtatttaaagagtatgaaaagtggtccactgggaatccaaagtatcgaatggaactttgaaaaatttttaattgataagaatgggaatgttgttcaaagatattcttctttagctgagccaaaggatattgaaccagatattaagacaattatttgaaatcatttgtaggtatatactagccattacataatagcatatatgtataaatattcttataatcattaagttgttttattttgtatttttgtccaattttttatttttttaccattcatgttgtgtaaaataatcatagttttccatatattctcgtatacttataggtctttcattttgtttcatagggaggatttttgtgcctctatgaacaacttttctaccagtaactggtactccttgcacaaaagaatgtcttctcatatacgatcttaatgttgaaaatgcatggttttctttattattatcttgatccttattaacagtatgtggtaatagtttaagtaatttcttcgagtattcatctatatcatcatcctctctattactatgcttattttcactattacttgaaacttgtgatactgaatcatcgtcatcatctttgaataaattaccactttctatttcttcactagttataatatagcgccgagatctatcatccgtattaattttactttcactaaagtcactgtcgattcctataatactattatttctgtgatcagtagcaatatctttatctgcaatattagatttcatcataaaaaataactcttgtgcttcaggaattaatccaatccaattcattaataacgtttgtaattcaaaagaacactccattttcacaaaatcaaactttccattctccattaatgttcgaaccatgaaacatattagcttaactaatccaattgcatacaaagatacatattctgatccctcctcacttgattcaccaacacccatattatcattcacatcatactgtgctggattactatttaaattattcttatttgataagtatatcgctgcattagtgaaaaattcttgtaataacatacttgtttcaatatctgacaaaattagtggcccttgtctggaaaatggaaacttgtctttgtttccactattcactgaagatgattcagtcttgtgattctggcttactagtatatcgtgtaataaaagtttcttcatatcttctaatgtagcatttgattcaaaatcttgtcctcgaagacccattaccaactcaaagatataatgaattaacgtatgatttatttccatatgagtcagaaaccaaatcaatactcgacgatatccattacacattaacatttcatccattaatctccaccccaattcatgattaatatataaaatctctccaaaagtagaattatcacataaaagttcgtagatatcctcaggtgttactattttagctttgtttccgtcttgttgccttttattatagtttgaaatttcgtttaaatgactaaaaatcattgactcctgttcttctttgacacaagatgacactaatcgtaacaataagattgcttcatcataagctagagtggtcgttgaagctttaacaatcaatttactaacatcttccaattttggactaacaataaactggtaagttgaagcataataaagatttagtcctcttgggacatctcgccaatctttaccactgtaatcaaattcaaagaatgctttagatctaccagcaatcggattatttgaattgacattttcttgattatttgtggtcattacagtattattttcttcaataactgtattatttttgcttgttatcatttgtgcaccatgtattttgtcatcatcgaagatgcaatcacatcttctttgttgaaacagttttccaatattctcattctctagaatattatcttcgttatttttactattagtcctcttgttatcattaattctttttgtaaccgagacaccattaatttgtggttcatcgtccactatattgtaatcctcatattcatattcaaacatgtatctaatatcctcatcaaatctatcacctgcctgtaagtctgaaaataattctgtcacattttttaaatctacgccaagagctaacattgcagctgcatatgatcttatatctgtatacaaggcaccttgacataatttccgtccatgtggagacataaatgtgtttattggttcatgtttaaagtcgtgttccatatattccatataattatttaatactgtggcaataacggctctcaaggcagatgcgcctcgtattgtcgctctaacaagtaacggagtttccctcacattatcttgttctaacatcctatctatatctaaactgaagagtatgatacatgacaattttttccagaccgaaattaaagttgataaaaacgggttcaactgaactggtttatcactaaacaatttatatatcacgtatacggccattatgttgaccatgtataaaagttctaaatcttgtgtattcaatccgtgtggtaaccatgaatacattagattccaccaatgttcaatatttttgttatcaaagttatcaactccaaggctttgtaaatgattatagtcttcacagtttaatctttccattgagtttaggattattctttccatatttaagccgatgtgaaatctagtttcgtacccttgatatcgtatccttcctgattttaaatcattgtagcatgaagaaagaaacaaattagccaataaatcaattgatataatatatttgtcgtttggtaagggctgagtgagtgggtctaccaaggtacataacatttcgaattgtaaagaagtgcataaaaaatcattaaatgattttaaatttaacattaatgaaaggataccataccttaattcagaatgccaattgatatcaaccatagaattggaatttttatctactgatgagatattggtgataccaatatttgcgtttatatgaggtttattattatcaatgtattgttgttgatttgaagccctttgcaatttgattaaatattctctattttcatcatattttgataactcatggaaatattctattgcagtatcggtagatcgcacagagataaataaaacatcccagaaatccgatttcgtaattggttttaagtaaagtttgactagttcatttttcgaaagaaaatttttttcactaaagtcctctgaatttgtgttcaaatcaatattaaggaagaaatcatatgttgtatgagctctatcatattgtgtgacaataaacccgcctaaatattggtattttgtagaagttggtattttacctgtaatataccatttaggatcggttacatagtgtatagtcatctcggtcaagcaattttcaatatcagctgtgaaaaaccgtaataagtcgatgagtatattaaagtcagtgttacatgctaaagatgttaaagtcaatgaatcttgccaatttgaaccatcgtataattgattcaaaaggttgttcttgtataatggatcattataattgcgtatatctaaaaacgataagtcattgaatagacaaaatctatagaattttagtaatgttaatagtgaccaatttgaatgcatataacttaatgctagcttcaatttttcgtcatatgtattgattaatttatcatatttgcccaaattaatgttatataattcatttaatatggataatccgattttcgtggtgaaaagaacaacagcagttgattcaataaataaataatataaatcctcagttggactttcaatttctttactgatttgagtccttaaggatctaagtgaaggtttataaccagagactctctgttttaaagatgtgaagttatcaatattcttattaatattggtatttgtattattcatttgaagattgaagagaaataaagcagtagaaaaagcactatttcatagacataactaattaaatttattgagttaatggaacacagtttgttagagagtattaaatttaataaaatacacatacaaatacacatatagacacacataaatatataaatatatatatatatataaatgtattgaagagtgcagaacataaaaaaagatgaagacataaatacttctttacagtgtcaaaatattgaaggaaaaaaaaagactaaagaaaaaaataaactcatgaacagagataggaaagaaaatagagagaaataatctaataatgataatatcaataattatgattgtgtgtatacatatcaaaatatatatatatatatatatatatgcgtgtgtgtgtagtacattttgttatttagaggacaagctgttatgtggatggttcaaataatagttaatcaatccattgtaacctgtatgatcactaactcttagtaaaatgccaagttctaagtttaagggagactcaccattaggttcggtcaataacctcaaacaggattcaacaacatattgcagattaaagattggcgaccacatcgattctaatatatcaagacatacagcaccagttttccaatccacgtttacatgtggcatagagtatggtttgaatcttacttttggaggtgacattggataatttgatggtatgtccagatagagtgtgaatttgtggcctctatatggagaattattgggtccttcgaattcactttgccaatgtgtcatatcattttcctctatgggacataggtaatatttgttcccgttcttatttagctgtgtccattctttcagtagcctagaattcataaattcgtttcttgcttgttcttaatagcttgggaagacgtggaaaatgttgaagtattcaaaaaaaaaaatttttttttcctgttttaaatataaatatcaatacaattatattataaatcaaggaaatagatacatatgatatgtttgccagttggtagaatacaaggagagggaaggacaaaaattgtactattgcctgtattattatgattgatattattattattactattagataatcttgtatcttgtgtatgtgattgatccgagtaaataaagaaatggaagatgaaagattattgatggtttttctttgttgtgaagctgtaaatatagaaatgtatcaacctcccatcatttactattatttcccttttttttttttaggtccaattacaaacttcttgaacaagactgaaaaactgaaaactaaaaaaaaaaaaaaaaaaaaaagtttaatagacgaacgggaaacagaacaagagacaaagaaagtatatccctctgccccctcttcccttcttcacgatcctacaagagacagtaaaagaccatgatatatgtttcgtattagcaatctacataattggtatctacataaacacacacatacgcaaataaactcgtttgtttttcagcttttaagtgttattagaaactaccgagattaataaactaggtagagagagagaaggaaagagaggaagaaagataaataaatatttacgaaaaaaatatgaataaaagtataaatttattgacaaaattagctattccaatgggtatggctataacattagcggattattcgatgtacgatgttcaaggtggtacacgaggtgtgatctttgatcgtctaagcggtgttaaaagcacggttgttggggagggcacacattttttgattccttggttacaacgtgcaatcatctacgacgttagaacaaagccaaagagtatcgctactaatacaggtacaaaggatttgcaaatggtttcactgacactacgtgtactacatcgtcctgatgttcagcaactaccacgtatctatcaaaatttaggtttggattacgacgagagagttcttccatccatcggtaatgaagttttgaaaagtatcgtggcccagttcgatgcagccgagttaatcacacagagagaaattgtatcgcaaaagattagaaaagaattatcgcaacgtgccaatgaatttggtatcaaattagaagatgtctctattacccatatgacatttggtgcggaattcacaaaggctgttgaacagaaacagattgcacaacaagatgcagagagagctaaatttttggtggagaaggcagagcaagagagacaggcttctgttattcgtgcagaaggtgaggcggaatccgcagaagtcatctccaggacgttggaacgtgttggagatggtttgctgttgattagaagattggaagcgtccaaggaaattgcaagaactttaagccaatcgccaaatataacctatttacctaacggtaagccaaatactggaagtggcaagacaggtaataatgattcaagtagttccacaactaacatgcttttaaatttaggcagaggctaatgatttgaaataatatatatgtgtatacgtatgtatatgtataataatgatcattattatacacttattcgcttctatttgtaaatatatcccttatatctatcttctattatatttcagttaaaagcgtttccaaagatatgaaaaagtcatttactaaaagtttagatatctcaaatgcatttatacatacgtacatatatatatatatgaagtacggaatacgaaatataaaatatatgcgtgtctatgcgtgcgtgtgtggctatgataaaaagaaaatgggtatttttgatacagattaggggtagaaaaataaacgaaagaaaaaaaaaatgaaataaaatgtatctccactgaaaaattgaaaaaagatgaagatgaagaagaattaggggaaaaagggcaatgggagaggacgcatattacttggaggctgtataacaatggaataatattaatattaatatattaaggaatgataaatgagaatacaatgaagcaaaattaaagataaaagaataaaagaacaaaaaataagggggaagggggggaaacgaaaagaggggaaaaaatataaaagataaaaggcaaaagagcaaaaagatagaaagagcagtttgccgaatggcccctcacttaaacggacagacatgattatatgtgaaaagcattagggctttcccccttttttttcttttcttttctttccgtctctctctcctttgtctttcttttttttctttctttcattacttcccttgattaccctttattttttctttctgttttatatattacaataaaagaaggatattggtatgtttgatagaaaataggaaggattgaggggggtacgggagaggaacaaaagaaaacagattatgataaatgttaacgggttctgaacaaaagtcaatatttaaacttgagagatgtttggaatgccttgagcagcagcagcagcatttcttcttctcctgctgacgtaagaattgttggagaatgcaccattttggaacatgttaatagcagacataatcatcttgaagaagaaaatggccattgagaaatagatgaaggcagtgtaggcttgagccattctacaacggttctcagaaccttgggtaatagaattcttatccaaataatgttgattcttacaggaatgagttctagtaccgacagccatcacggtaccagcggtgaatgtaaaagcaaaatttaggaaatctaatgtggttagaacaaatggccatgctaatggatcccagaaattggcaaatataccgtagaaggaatctgtagcaattgagtaggcagctgtaaacatacagtagttaacacgagaaacatggtgtttttgagtgttgattagtgctgacactaaacctaaacaaatgactaaaaatatgaaattgatcaaacgtaaaatgttgtctgcgagagctagcatcttgtttttactttttttatttctttgtttttaaattagttattttgtttacttatttttttgctatattttatgcagtttggttttatttttttttgtgtgtgtatatgatggaaattttatggaaataagaatatttaaacaaggaaggatgcaatgcaatggaaaaataaaaagtcaagagataaggaagatataaggagaatgaggaactactaatgagaattgctaaattctttttttttttgttgaaaaataaagagagatttcgacgtttatatagtttcaagtatttatttgtttgttttgttcgaccatagtccaaaagcaaggagagagaaaaaaaaaaaaaaacaaaaagttattattatttgttttttttttttttaaggatcgatgagacttggattgaagagaaagggattgaacaaataatgacggaaataataatgatgtaatagtcatagaaaggaagaataaaaaataaaacaaacagaacagttttagtttgaatctgaaggggaagagcacaacaaataaaataatattccaaaaagggaaagagcaataataattatagagaagaatttttctagaacaggggatattttatctgggtgtttttttttcttctgaaaaatcataatgatccgcggaagatgattgtaactcttccttttttttttcttttggtttttccccttccgtggattaacccaaaaaactttttctggggtcctattttaggtggcattaaaaatataccaaacctaatcaaggtactataatagaagagagagaatttaacgaattcaaagaaaatgtcgattattcataatggataatattataaaaaaaaatttgtatgaaaactatatgaaaaaataaaattgttaagtttttaatgtgaagaataaaacttttattgttctttttttttattttgaaatttgaatatttttaaagaaatatttggacttaacatatgaaactcttcttatcttaaaaaagataaaaaaaaagctaaatatgtagattatgaataaagccctaaaatagttatccaaaaaaaatcattcaagaaagatggaaatctaataaaaccagaatcccctagatttaatttttttttttgaggaggacgtggaagagagaagagaaaggaatagggaaagagaaaggggaaggagaagggggagtgggagtttgcattttccagttcttataggactgtaacctgcctatagttatttgcatgctgaaaatggaagccgtttttcctaaataggaaggcagtttccttttttttctttttgtttcatgccgattccagatatttgacaatgaaataaaatgggcaccaaaaaaaaagaaaagaaaagaaaaaaaaaaaagagaagaaatttgtcagtcattttctacggattgaatactgttatttcctttgttttccatggaacgttttctttttttatcggaatatgcggaatttctctatctttctttttcccttgtggaatctccctgtcagcagtttctgccgcacaatttttttttttcaacccctttccttaatctatttttttttccttgttgcatcgcatttctagtatctctgctgctcgagccgagcttctgccaatctcttcgagacagagagcaaggaagtgcaataaaggagttcaaggaagagaaagcagagaaagagacaaacaaactaaaatacaaagcaggaagaaaaaagaaaacatattttttaaaagctcctcaggttgtaaatacttgttgtaataccaatactatggttgaaatgtaatgcaaaaaaaaataaaataaataaataaataagtaaataaataaatcattcaatagaagaaaattaaaaggttatacctaaatatatacgttacaactccgccttattcatattctgactataaattagtgtaagttaaataacatagaaaattgttaataatatcatgacagaaacttctacttcaggtaatttgtttttacaaaagacccattctctaaatgacaataaagaatatgtctctcctttcagaaatcaatcaacagttccagggaaggctcagttacaattgattaaaagtactaaatttccgaatattagtgcaacgtcaaattataatttaaagtctttgataccactaaatgataacttgaagaataaaccaagggtaaaagatctttctttcccacaactattgatcgacaacgaaaagagacagttgctacaattagacgatttgaaagaaaaggaggaaaaattaaagattttaaaaagttcacagattctcgttgatattgaggataagaaggtcgagaataaggaggaaaagaaggaaagggaaaatatacaagttgatactcgcaaagataagactaatcgtattgctgttgattatgattttgttcctccaaaatcattagaagaagaagaaaaggaaaagaatgagaaagaaacagatccaattactgatgattacataatggatgctgaggaactccctaaacgttctattgctaacagtgatgattttacagataatgtcaatctttacactattgacacagagttggagttggaattgaaggaaaatattgaaataagtgaattgaaggatgcaaatgatatgattttagaaaataaatgtaagtttaacaaaccattagatccagcattagctccaaaagtatatttatccacggaaaatgggtctactaataaaaatacagagaatactattgttaatggtgttggtaataatcaattggtaatcaagaatccaaaggctacaccagagaatccagaattaatagttaaggtgccaaaatatggggtcgtatcaaaagctgtttatgattggattcaatataaaaatttggtaaatttaaataagattaacgatctaaatgataactataaaattcgttcagacttgaaaaggaaattgtgtcaagagaaaatttccaagattaataaagataagactaatttgttggaaaagattaatgatgttaaattgagacatttgaatgatttggagacaatcgaaaatgataaaatctttaaattgtttcaaatcaatgccaaaaatattgaaagtaaatataagattatccattcaacagagactttgaaattatggaagttaagtcaattaaaattccaaagacagaaacaggttttgttacaacaacaattgaacgaattaatattagaatctaataatttatcaaatgaatatgagaggtggaatcatgatttaatagaaaaaatggaacaacttgatggtcagttattcaaaataaatcaatataaatataagaaagatcagttaatttctaagatcggtgatttaaagaatgaacaagaaaagctacaatccgagatcgatcaaaatttagaaaaggaccaaatgaataagactaatgttaagaatattacactaggtacacatgaatataataataaattaaacgaattgaccaagacaataagtgaaaagcaaaacttgttgtctgtagtcaaacaagagatagccaatgagaatttgaatttgttgaaaattgttaatgatattgaaatcgaaaaacaaagaagagaggatgagtggaatacgaagttacaatccaccacgactatgtttgaaacaaaattaaagaataaacaagatgaattggatcagatgttaaatgacttaaagaataaacatgatgaagaattgaagaaattagaaagtgtatatcaacaagaattagatgcaacaaagttggaattagaagaaaagactaagaaccatgaattgaacgaacaacaaattaaaagtttgagtgttcaaaaattggatttagagaaaaacattaaggaactgcaagaaattaatacagaaaagatatcaaaattaacgttaacaaataatgaaattacaaaaaaactggatgaacaaacaaaattagcagaagcattagagaaggatcgtgaaaaaattaaaattaaaatggattatgcaaatcaattattacaagaaaaattacataagaatcatgagactactgtctctgctaataataatattctgaacactcaaaacaattccttatattcatttgccacagaggaagagatagtttataaataaaattatcaatgttaattcaatatctctctattatgtttatctatttccttaaattttaacaaattgtcaattgaaaaagaaaatatattatcaaagatatatttttgatgtattgaaattatttgaatatgttcgatcgcaattatatgtatgtatatatatgtgtgtgtggatgtgtgtacaagttttatctagtttttttattggtccatttgttgttttttttctctctgtaatttatcattaaactgcttattctttatattgatgtatgccatattattaggcctattgctgttaccactgtaggtattattattgtaatttgtttcatagatttgttttttccttatcatatacctttttctactagtttgttttaaattttctgctatagcatctatattatttatattatctttatgctggtgcttaagctttgacatggctttcatttctttttcatatgtaaatttagctaacgtatcgccttgaatagatacaagagattctttcttatttgtgttatacatattgataccatatttcttttcaaaatcacgtaacgtcatgtttaatagctttaacgtttcttggttgttttcaattgtatcttccagctcagtataattgaggtcgttttgatccgattgatcattatttacggttatttggtatattttcggtttgccaatagcttctaagacttttctattttcaaccttaatatcttgacatcttttcctcaacaatttaaattttgattctatagcttcataatcagtcataattatgcagtttgaagatttgtaactaattgtttctcttgactatggttctccacatataaagtaattgggtagaaatcttttttctccatgttgagtaaagtggtgcaagaagccatcgtttcattaagacattccagcagtagtcactgtttgatcttacctctggctctattttatttaaaatagattcattaaaaataactgtatatatgtgatatcttaagatcatttctaacgatttttaatgaaatcgtgaataacgaaatatttaaaaatcgttttggacgaaaaactgtattaaagttgaaaaaactaaaaaaaaaaaaaaaaaaaacaaaaaaaaaattttatagtggtaaagattgagcgatgagatgaaattaaagtgagaaggttgaactaacaaaaaaaaagaagaattcctttactgtaaaatattgtcatggtgatctttattaaattcttttaacattagtagtgtccgtgtaatagtattttctttaaaggaatttcagttgaaattcatagacagttgagaaagaaatataataaaaaatcagaataaacactatatacagatatatatatatatatacaaaggataaatggtttctccaactatatctcagccttttgcaattaccacagtcccaagacaatcaaagcctgtgccaattctagtgtcaaaaaataacctggatgcaaactccaacgaactgaatgttgccttttcgaagtattccatctcaaagtttattatcaacccaacacctaagttaattaatgctgtccctatcccttctaatttgattattactgcttttgatggtaaacaagtttatgctactgtatctggaagcaataaaaatgctaaaaattttacattatacttaaaccaaaatacaaaatttaatctgcctagtaaagttgtaaatgtgttgaccgataaagataatattactatagcggtcttagaaaatggtacaattcaaagttatcataataatatgttggtttcaactaaatcaattccaatgaaacagatctcacaagtggaatttattgataataagtttgcattaattataggagaatcctctatagcattatacgacattgaaaactggattgaattacgtgtttctacaactttgtacgaatcggaatgtcaaatctcacaatttgaaaacaaaatttataaattctcaaagacaaataacaaattccatgtctacgatttaactactttaaatgaagtccaatcaattaatataccttttgtgaagccaaattcgtcatatgtttcatttcaaccaattgctgagaatcaagtctgtttggctatagataatgaaatttattatttagatttatacttgggtagtgttttatcatatcaaattataaaaagattgcagtggtttcaaattttgaatggttcactggatggatcattcattattggtctttcatataactataattcgatatcattagatatcataaatatagaaaagggtagtggtagtttgaaggaatctttaggtaagggcttccaaaatttcatgccaagccaagatattactaagacactaaataatgattttgttactctaaagactttatccttatctgacaataaggaaactgttacttataattataattatgataatattttgaaaaatttaacagatagtgttaaagatatcaataaatttgatgaagtttttttcaatagattgaatattaagaaggatttctacacggaagcggatagatatattatcaatcaatctttcttatcggaggttatagagttagttttgaaaaattgctcatttgataatgatgattcatatccaaagactttaacgtatcttttaactcatccattgttcccgatcataaatacgaaaaatttattgtcaaggtttaaaaattgcccaagactatataagcaagcggttgtaacatgtccaaatttaccattagatgaattattaatggaactattttcaatcaaaaataatgaattggcattagatatatctttgagaatattacaagattataatagggacttgattaaaaaagaattaaaagttttaccaaagattgatattcataactttataaaattcatcatatccaataaagattcggaaaacgtcaataacagtgataatgacaataataatagtagtgacaatggaagcgatataatgattccatccctattgtttcagctagtatcacttgtcattgattctatcgggttatttgcacttgatgaagatttattaaacaagctttctgattatgttaataatatgattagtatcattgaacaaaatacagaactttggtatcttttagattctaaaatggaaccaattaccaaaaataagaatggcaatcatttcaataattctgctgttcatattaaacaaaagaatgctaaaaaagtcataccaccatatacggtggaatatatagatatatagattaattttaaataataaaatatgctacactgtatattagaaaaggcatctgaccttagattaacactaatattaaaacttttgtaagctgggaagaaaattagaataggaatagtagaaaagtgaatattgatactagatatatgtaaacggaagtacatatagaaatatataatatagatgatcataaattaaaactgaatgtatttgttttaattgggttatattgattgtatgaattgatgtcagaatcatgaatatgtaagactctttccgatacatggactactgttccatctttattaactagagtgacaagttgagatctagtaccataataaagacctccactcatagttagccctacgtcttgtttaggcaagcattttaaaggtggtacgaatatagattccgtggtaatcataggatccttaatgatggtttcattttgattgttaattgaacaaaatgaagcaatttggaagcatttttgaaagattttttccacatcattacaattagaagtttgttctattaattcttttaattttaatttccctagtttaattttagaccattccattatatcgttctccttatatggtttatatatatcatttgataaaaccatattatagccattctctttatcaagtacatgaaaagtttcacctaatgaatcaattactctatactcatttttttttatatcaccataaaagaaattaaaatcaccagatttatctaaaaatggataacattgttggaacctttcataattttcccaatttacaaataaatcttcattaattggcttctgtgttaaatatttaaaagggatcatacctcttgacattatcttgtgagaatttttagaaaaaatttggtttttcccagtaaatcttagattcaatacagcagatatcttgccatttctatttattccaacccatgttccatatatgtctttttcgctattatataacgcagtagtcatatcatatggtgatagtatataatcaccattgtgccaacatgtgtcatgggtctttctttcaaaaaattcatctctattagagatcaatatgagtttaaaatgtggatgttctgttgtagctaacaaaatgcacatattatatatgtatattataactattataactattataactattataacgacttcaacttgtcataaagattaacggttgtcaacctgttttttttttcagctttttagaatttcttttgttatagtgatactatttaattttaacagtgttctttctcctttttttgtttagtcttaaatttactgatatactgatgctgttccagagactgctcacctcagtacttcttttgttacctatttttcatgtatatttatcattattcgatctacttgcttcccctttagctttcgtggaatctccgcattttctatttttttttgcttcaggagggctagtaaacttcgcggaggacaaataaagcacaaagccaacaaaaataaaagcaacgacgtcgagagcttcagtttgacctgctgactgaagcttttttaaatggaagaactcggttggtgataatgttatatgtcaaccactcgtatatgtgttttatatgtagaaatggttgatgatgttggataggagtggagtggggaagatacaaaaaacaactaaacaaataaatacaaaggaaaaatcaaaaacttgaggaaaaattatctacaacagctcatattttagaatatttttatcaaaatatctttgagaaaaatcctttaatacccttttgttctttacgtttcttcattttttccaattctttacggttcctttctacagctctattcaatttcgctgcagtcaagtgaccgtcatcgggattatccacaagactgctagcgaaggatttgctactcttattactcttcatcgattcagttctacttttcagagatctctgtgtggaaatccttgacgtttgtctccttaaagtttcaatagttttcattttgactaatcccgtatctgtttcgattgtatattcttcaggaaattctgctgtttttgtcatagttagtggattattaatatctggaacaattttttgagatccatctaacccctttgcggcaagggattcaacagtttctacattgtctcctaaagcgttatttgtcactgctctttctataaaatatgaactttgctttcctagtgtatttaaactattctttgaatttaacttttgagacttctcttggttcaaaggtgtagtagctgttgcagctgtcgttgcattagttgttgcattagttgttgcagtggttgtcgtattatttgtgatagcactaccaactgtagttcttgtgtcatgtctaattatagtatcattctttatcaacgttgtatccatattaccattgctatgtaaatcaccagtaaatggttcaggtttataggaatcaattgatgagaaggatgatacatcatcgaagtcgatatcagtaatacttgaatttgttgaataagacatgtttaattaataatataatttgtttagtgtatatttatgtatatgaaatttatggacggatatagatacagctgtgtgtgtaggcaaacctatagaagtacctattgatacaggcgcacgaaaggcctttccaaaaaaagaaaaagaagaagcatgagatctagcagttatgtattacttcaatgtttattaaattgcacttgtgtttgggtatgcctgcttgtttctcatttccatcaataaactgtttctggaatcttgaaatttttcttttacttaaattcatttttctgtcaaaaattttttttcactttttcttcagtgtgaatgaatgaagagatggattaacaggtggagtgactagttaaaaatgagacgtgtgattttagatacataaagatataatctattggcaaaaatgagtaggtaacgaggtgatagcttttgcttaggagtataactagtatttttgtttcttaggagcttactaaagcatgtcctaaaagatctttgaatcttttatctttaatggacattaccaataatgtcaattcaataaacagatcgggttctttctccctcattgtttgcaatgattctttatcaataacccataatacagcatctgtctctgctttaataattaaattccccttattggcttcactcttgttttctgttgtatctaaaacattattaaattgaatcatcatcttaccgtagcaggtcttgtttgacattgtttcataaacagtgccttgtggtagattgaataacgccttcaaaacgcctgtttccacaacaaaaaaaatgttattatcatgttgaagaatggacccattttcaataactccttttttgaaatatggagataacctactccataatgatatctcttgatctcttatttttttctctggcgatgctatccttgatctataaggttttaatgctaataatagtaagaggacaataggatcttcagattttagttgatttcttattgttttagctgtttgttcatctgttttgaaaatgttctgtgccactgaaaatatttgatggtttcgaggagtgttgattggcattgacatgaatgaatattttgtattaataccattttgacctatatttttcttgataatagcagtcccatattttgcaatagtactgtttcctttaccagtatcactaatatcattgggattatttgtatgatcagttacaacaactgtaggattattactatcagaagattgaattgtggagagtctattattatttgcaccactgctgttttcaaatgtcttatgagtaacactattatcacggttattaacaatattactgttattcaattttattaatctccttttagctttgtctctaatttccttatatcgatacaaaaattcattttcacaccattctaaagcactatttaaatcattaaacaattcaacatcatccaataatccgacattattaaatgcattatatatgtggtctctttcacggatagatgatatgattaattgaatttttttagtttgtgtaaatcgtttgattctattaaatccttctgctgcagaatagtcgatgttatccgcatttatatttttaaagtcaagaatcaaatatttaattctgcgtttcgatgaatctttgtcactaatttccaataatttatcaactttctcctcaatcgaaataattgtaccaaaaaataaaaggttttgtaatttcaatacataaatttgttcgccgataccatttaaaaacttggtttgaattggatctctataaacagtactcttggctatagtgccattaaattcgccatttattgtctgcaatttactactatcaatcaaaaatttgaaacatgcaatcaaaatacctattattataccaagaacaaaatcaaatatacccatggttaaaacaatgattatcacagtaaggtattcaaaagttgttaatttaccccatgtatcaattaaagcctcgactaacaattcgtatcctaaaagaaagattaatgatccaacgatacaaatcggtattaaagagataatgaccggtccaatcagcatcacaataatggtgaaaacaataagtacataaccagctaaagcagaatctgcacctgctcgtatgaacagaacactgtttgtataaactaaataattttgaatggatccacatagaccactaattaagttagaccaaccatgtgcaatcaattctctatcaacatcatatttatccatttgtaaagacatggctaatgcaggaacattgatcgggacatgtaatataccaaaaaaagttaatgccagcatagtaggaacttgttttaacactaacaaccaatgaacatttttgaaattaaaatatttataatgatcataccatttagaatctgctgcagccattgggaaaatccaacctgaattacgtagttgagttaatgaaagacttggaattagggccactataaaatggaataataacaaagttaaaatataaaaagatggtaaaaccagtgaattttggaaatggttttgtgtgaggattaaaatgatagttaatattgtaggtaataaccatttccaaagagtttctgtgtccataaaaagatctgataaaaatgggatagaatattcaaatttcttggctcttgtacatacttctataccagtgatcaataggaaatagccaacaccaccgatacaaccaatcaatatatggcgaggaaaaaagccgacaatctttcctaatttcaattttcctaatagcaagaatgttagcccagtgatcatggcactgatgacataacaaaatattgtggtggttataacttcttctggtttatcctggcctaaagtgttcataatagtgaaagccatagtatgaaaaaatggagtaatttcaatcatttcactaccgataccacatggaaaactagaccatcctccggataatatagtttgacagattattgttgatatatagaacatcgatatcccagttgcaccaagttgagagaataaaggttcagtaatagggaatataatcataccatatgatagagcatctaagatagtcaaaagtaaacctaatgtacaagcaggtagatagttaatgatgtcatatgacaaagacgataatttctgataaggtgaaagatttgtttctaatatagaactacctgtttcaatatctatattgtgatgtgattggatgtgggaaccataagatctgtacgattcagtaggtactaatagttgtgttgttatcgactcatttccagagacagtagatgaaatgggagttagatatggttgaggagtatcttctaaaccaatagtagcattagtggtaatatcattgatattggtatctaaaccatccatattatttcctatgaaagtatcaattatgtctacattgtcaatagcagccgttcttcttttgttagtttcaacaagatcaatatattcatctattttataattattataatcgttggtgttattgttattattatccttattcttggtgttattattattaatattattgttattattataatcatgataagattcacttaaatcttcactaatctctgcagtttgcctatgtaatttttgtgattgatgaattggtctaatatagttatttggattatttaatggtaaatagctgctgttactggcaaagttaaaatcatttctgcttaatcgtctaaatgcaggagaattggatagaagtccactaacataagatctgccaaaatagtttgtttgcaatggattgtattgattgtttgaagcaggaatactgttgctattaccattattacctccaataccactatctcctcctgcagtactacctagtgcaaaagaattattcaggggctcttgtaatcctaaagacacagaaatggaatgcggtatagacgcaattgattgtcttttccttcttcctataaattgattatgagtcatcgtcacactatttatttctaataccgtaggtgtttatgtgtgtgacttttgtattataatatactctaattttatattcttaatgtctagttgttgtcagaatttgatataattaataaatgaataaacacaaatgtaaataaaaaaaatataaactaggaagcaataatctttttgagtatttactttatctttatacaaagcagggatgttacaaatataccaatgacaagagagaagtaaatagatatacgactacataaatatagatgtacaaatataatatattgtgtttttcttatcttgtcattttgttaataattcataagttgtttattttattagtggtaacagtagtagtaatactattgctactattaatgttagaatatatgaatcggaaggacatcggaattgaaaaaaaaaaatacatcaaagatttttttagccatccacgaagtcaaaacagaatagaaaaaaaaagagtcatagagggaaaacatgaaaggaatactaagattatgatactactaacattgttactattatattaggagaagtcaagaaaaaaaaagcgggaaagtagaaggaaatatttaaatataactcttaacagaggactcagtttatttctaattttgactacctctctttcaccttgactattctcagtgctactattttcttcgaatatgcaagatttttaataaaggataagttaagagttgtgctttctatattcctacaacatttctaaaaaaaaattatagtgaccattccaaaagacaaataaataatatataccagatattcaaaaaaggaaaaaggaaaggaaaggaaagaaggggaggtggaattgaagtaaatatattgatatttgtcagttcatttaaaaagaatcagaattttctaatatgacgtccttgaaatttatttgaaaaaatttgtaacaagattatagaagcttgcgcaggaaccgtcttctccattaaaacctcaaaacttggtccttatttgtacaaaataaggaaacaaatttgagaagaattgttcgattaaaaagacgcaaataatatcatcttcttcttttaaaaacttggaaggtcattggttcctcttgaaagggagaaaacaagaaagagaaagatattaagaaaaaaagtgtggccaagattgaagattgaacattaatgtgaagttgcatacattgtttcactgtctaaacagagaagcgtccaagaacacacacgcacatacatgtatatatatatatgatttttttttactttcaaaaaaaaaaagaaaacacatggatatttctcactttgtacggtttaaaataatatttagggtttaatgtgattttaaacctgagtcctagttttacatttctttcgtgaagaaattagaaaaaatgtgaggtattatgagactcgaagatgacttatacatgtatatatatttacttgttaagagtacatagttaggtttgttagtacatttcttttagagagaaaaaatagaagctgcttcctcttttaaaactagataattaattagatacgaacaaactaacatatcagaaaattagtgtaagaggaattgcatctaataaaacagtaattatgtgaggaaaatagacattaaacagttaagtgcttatatatagtagcgacaaaaaaagataaagattgtatatctcttgtgcagtttgaaagctgttgtaagatatcacgtatatatatttgattgtaaaaagtatacttttaaattcctcttattagtttactttccttatatgggagatataaaaaagaatacataaaaaatttaagataaaatctaaagagttgcaagggtaaaaacacttcctcataagtaagatcaggaattacgaagattttacatagtaattaataatactagctattggttttttcgtttgagtttttttcttgtgtgtatgtaactaatcattataagaaggtataccttagatgttatagatatttgtaaatactattaagtgataaagtttataatatgtctattatagatgaaattcttcaatctttagtacatgatgtataaaaatgaatatttaaaaaaactaaatgtagtaatataaagtgtttagaaacatattgtaaatttttgttgattattatcttttccttgtcctaatatacgaatttatatttgggtcaaaaaggttgttatcatttatttcttaattactatgtttatttttataagttttagaagcgttgtttttgaaaatatctattggttcatcttcagatattgttccagttttttataaatattttttcaatattttttaatataatccataattttgtaccaaaatgtattgtttatttatatgcatctttgggtaattgtgtggataagagattttataaaagttaatttaaaaatataataaaattgaatatttttgaaagatctgaaaaagaaaacttaggtaaaaaatgataaaaataaaagaaatctctaataatagttaaaaaataaacattttcttcttctttttttttttttccctttatagttatccttattagatatgcatatataactaatattttatatgacatataaatatcctaatatagtttacttcaaacaaactcccaacacgagcacatttcactagtaatctacatccaaaataacttcatattcatcagtttatctagatatgattctattgaaaataaatgactactcctaaaagaattaaacgctgtttttacataacaaaagaaaaaacttccacatatcgtatatatctttttcctattataaatattaaatgatataatgattagtgtaccacacaatcttctcaatttataatactagaagtttcaaaataaacccgtgtgcaacttatttttttctatattttaatatagtgtatatcttaaagtcaatcattttcaattatttaatatccctccatatgacatgcgaacctaatgaatttttccgatttataatatctctgtaatgaccatatatgtagtaaacaaagacattctaatagagaagtacccctctaaaatataatatacggtcaataatttttggtttccgtccttgctatataataaaaaaactatgctgtatataagatatagtctaaataaataaacttatagataaaaataatcataaagcttatacacttaaaaagcaaacaaattattatgcattaaatgatgtgcaggattatctacaatagtatcaatacaatatccatttcatctaaaatctgtaatatccctgatattactgtttagggttttgtttaaaaaagtattgtcaaccctcatttttctaaactttcctttttgcaaattttacaaacatagataaaaacaggagtaaccaacataagcacaagagagcaaccaagaacgaacaagaacgaacgagaataaggtacaaggaaccaaggattacataagtttagatatatagtgtataagtgtatactattaggttatcttggattagagatatatatatatagatatatagaaatattacatctagagatatagaaagagtctatatcttatatttatccaagtgaaatattattgagatttcaacaagaattactattatcagaaacacataacctcagggttattacaaaatcaaaaattaaatgcctcgtaataaaaaagaatgcgcaagcccggaatcgaaccgggggcccaacgatggcaacgttggattttaccactaaaccacttgcgccttttcatcattgactatgctgtggaatagaatacttataaccatcaaaattacataagatcctgaatgaatctagaactaattattgtcttaataagccatacacgcgctacaacattagatgctgcataataaaaagattagattacataagattttggcaaatctagaatttacctattgttttaataagtcccacgtgtattactaatcaccatgattagagaattggggtgcagttgtaatccactagtgcatctaaattaatgtaataaattttagggtttggagcaccaagcttgttaatgtacaaatctgaataattgatcgagctccagaaacatataaaagtacaatattttctggagataaatgattatcttccataaccgtttctcgtaaataacttatatattatgtataacaaaagagaacaacaagcaagtaacaagccaagtaacttcgaataaatatattagctcgttaaagccgctcaatatataagaccgttttagtaattctaaattatttataaatattctaaaatattcaaccaaaagtgttgacgcaaggtttcgaaatcaaaaagtctagtagagttcattttagattaatataataagataatgtaacttacaataggatattggtggtattataagttttattgttatttatagtaggaagttagtggtactataaattgttattgtatttctcggtcttcttctttctacataactaacatacaagatacgatattatacagtatactcattttatcttcgaatcttctttaatatcaattttcgtaacttttaatcacttagtacggtgagtttagattattaaacataactctaatcatatttcaacaaaaagtatttataaaaaagagattgtcagaaagaagcttccatatgataatgtatatccattggaaaaatatatgtgaccaatttaggattaaaataattcctcgagggatttcataatatacctgaattgtagtataagttgaataaaaacttaattgcatttggtgccaacctttatgaaacatatataagtctcttcctcgaattcatcagtatttacaatcccaaaaaaaaaatttactagatatttcccacaattttgaaacctcaaagcattatctgtctatgatactgtatgaaactacaagtaacctgctaaaaaacaaacatgttatacttgaattatatacaaggtaagtacaataaaaagcaaaaataacaacaaagcttgaagaaggtaagttgttaaacttgaagggaagcttctttatacaccaaatgaatcatatcataagaaaatcactatacaaatctacttaaactctttactctattataaatggtgcaaaatgattaaatcttcggcttcacttttcatcttccagtaatttttactaatatataacatcctgaaaaatttcttttgtattcgcttgtattcgcttttaaaaacttaaagtgacacagaatttttataaacatgagcttcaaagtcaatgaccacctaattcttaaaaagaacactttagatcgttggagtttcagtttcagtaaaacaacttcctctataaaaccaaaaaaactttttcctttaactttttcttcttttttttaaagattccgtacctccccgtcttctctttttttccccttctccactcctccttaaagttatttgatctctacatctaaaagacgttacttcccctccctagaagagaacaattaccaatataaaggcaagcaaattagtaaacatagtgccaagaatcaattagtaaactatatatttgataaattaaaaatgattgatttttgctgatgacactttagaaatataaaggacagattaagagactaatacatttgtattcgtttaatttatagatatatatgcaaagaattttttttctctatctaatagatgagcctgggaaatttatcacacaaagaactaatcaaaacaatcaaagacaaatgtatccccccattattatcacgcttttataagggacaagctggtggtcgggtctgcatcattggtggctgtgaggactatacgggagcaccgtatttcagcgccaatgctactgctttaatgggatgcgatttgacacatgtcatttgtgaacaaagtgctgcaactgtaataaaatcgtatacaccaaatttaatggtacacccttatttattagactctaatacttttgaaagatatcatcaaaatgataacagtgatgtaattacaaacaagggaaacataaaagacatcaatcttgtgaaaattaaaaccctgttgcgcaacatccatgttattgtcatcgggcctggtttaggtcgtgacgaaatgatgtttagtactattaaggatatcatcaaatatattttggaagagcttggtggtaacattcccattatactagatgcagatggtttattcttgttaagcaaaaataaggaggtgcaggaattattaacgaggttccctgatggcagaatcatcctgacaccgaatgtagtagagtttaagagattgtatgattcattaataggagaagataaatgtcatcgtgaaaagaaggaaaacaagctacaaggattagaaattgccaaacgattaaaatgtattgttgttgagaaggggcatcaagataagatatttggatgcaatggcaatatattaattaacgaacaaattggttcatataaaagagttggtggacaaggtgacacgttgacaggtgcaattgctgctttacttgccttcagtcgtgcgatgtatgatttcaatattacaaacgaaactaagaacgtcaaagatgaaagcgatggtctggaatggattgactatgcaatgttaagttgctatggtgggtgttgtgtaacgagagagtgttccagactagcctttgcggccaagaaacgtgctatgcaaaccacagacttgaacgatcgtgttggtgaagtctatgataaaatctttggctaaacatattctaaggctgacaagcaaaggcaaagggaaaaaaaaaaggaaacattgatgaagctatgtagaattaagcagtatgatatatgagccttaatgatatgtgatcttaaaggacatcatactaaatatatattatcgtgattaattaatattttatagtgtttaatatgttcttctcaatcttaatattttgtcttttctctttatttcgtatcaactattcaattaacccatacacctatagcttccggtacattgagtcatacacacatataatcctttaacaaacaaaataaaacccatacatttttgacagcgtaaagtttgcagcaaaaaacaacaaccaaatatatctgttttctttttattatttatttatttattctatatttttaggaacatacgatctttaccttttaaggaatatgtggacacgatatgaagtgactgtttgtgattattattattagcgaaagaagaagaaaaaaccacgacactgagacactacttccaattttaatgggaggaacaatcttatagtttgtgctaaattctcaagaaacgtaatccaaaccctatatatttattctagaacatagttcaacacaaacgataaaacacagtcacaacacaaggaaaccctatattacacagtagacttcaagcaaaaaaacttcactacaagattcaagaaaagacttttgcacaaaacatttttaaacatacaaaagagaatgtgttgtgttaaaaaatattgtggttaaaaactccattcgtcagtaaaatgtatcattttccttgcacaatactacgatttgctgttgttattgttattattcaataacatcttcctgttgtagaattttctttttttataatggaaaagactaggaaaccctgacaaccaaattaaaaaataaaagagtttcctgaagaaaccctaacatttgtagtttttgtttctccaaacaggcagtaattttttccttgctctttcgatgaaaattcatgtttgatttgggattcttgatttcttcagcgaaaaaaaaaaagaaaataggaaaaagattagttgggtggaaaatacaatgggccagatgcaaaagaacaaaacaaaacatttttttaaaaaacacaaaataaacaacactgaaattttcctgaaacgagttcctttttttatttttatttttattttttttttttgctgtaatacttctttgtttattttgttttgctttgtttaaagagatcttcacgataccaaaaactttcatgataccaaatattcataataccaaactttcacgataccaaaccttcgtgacatcaaacacacacctttccactagaaaaaaaaaagtcttttcttttgtctagccttcatcgtttcacagttcttcagtttctttatcaaagtgattatgttggtattctccactgacacttacgatatgcattcacatctatctgtctatatatatatatatatatctatttgaaaagcgtaatcgacaaaaagcgttgtgcagtatcgacaccttatcacatgtgtggtgcttagtatgtctctttgttgcgtattttactttttcttttcttcttcctgatgtactttcttaattctgtcattcccttttccatcttgctactaccaatcccacatatcgaaagataatccacactacacttcagatatatagcaatgccaagattagttttagttagacacggtcaatccgaatggaacgaaaagaacttattcaccggttgggttgatgttagattatccgctgtcggtgaaaaagaagctgccagagctggtcaattattaaaggaaaagaacgttttcccagacgttttatacacctctaagttatccagagccatccaaaccgctaacattgccttatctgaagctgaccgtttatggatcccagtcaagagatcctggagattaaacgaaagacactacggtgctttacaaggtaagaacaaggctgaaactttggaaaagtacggtgaagaaaaattcaccacctggagaagatccttcgatgtcccaccaccagttatcgaagctgactccccattctcccaaaagaacgacgccagatacaaggatgttgatccaaatgtcttaccacaaaccgaatctttagctttagttattgacagattattaccatactggcaagatgttattgctaaggacttattagctggtaagaccgtcatgatcgctgcccacggtaactccttaagagccttagttaagcacttagaaggtatctccgatgctgacattgctaagttgaacatcccaactggtatcccattagttttcgaattagacgaaaacttaaagccagctaagccatcttactacttagacccagaagctgctgctgctggtgccgctgctgttgctgctcaaggtaagaaataagttaatttaaaataaaatatgcaataataaggtcttgcacatctttctaaagaagttaagatcttttatcttttttttgttttattttaatttttgatttagttttttcttttttaaacttttctggcttttcttgccttttctttttttaacgtagctgtacgtttttaatgtttcatttttatatataagttttcgtcgctaaactatataaataaatatacttttataaacgtcatgatgaagataggataactatacattttaagaaaatgaggaactcaatttccatctctctatttatttgtaatgattcttttctcgaggtacttgatttctttctgtagacacctgtatgtcacagagttgctgagaaactttgacgttttttttttcttaatggctactaatttaataattatgatttgatttgtccctatataaaaccaacaataaaaagaaacactaacgaatcacaatttaatatacacactatacgttcataagatctagcctttcaatctattcaaatctacgctaattattgttactaagtctataaacatacacatctgtatcaagcagatccattcgattcattctggataaatttctaaaagatgatttataataatagaaaaactattgtagaatatgaattgttcaaattgctgaaaaaaaaaacatcactcagttctatgcatattttctactatatgattaatttcacaattttatatttcttctccttaatcttgtcatcaccattacctaaaagagtacttgtctactgatttacaattctacatctcttaacatcaacaattacattattagtatccaatatactataacctataacaaattatatgctttttcttcttctttttttcaaaatcaaacgtacaaagcaatatcttataatatgaatatatcaattccacaaaaactttgaattaactactcttttctgtaaaatgccataaaaatacatatgatcgggcaaatatttacagcgctgttgggtcataatcatcctcattttcatcatctttattaatatgtgaaattccactatctgctgaccccttctcatcatttttctccgaaatatcagacttgtgcttcctaaaagatgtctcttcaggagcttcattgttatcatcatcatcatcttccaatatattattagtcacaattgctacattatttaaatcattgttagcgacaacagctatatttgtatcactgctcttcttctttggaaccaaatcaatattgtcctcaacaatcttaaatcccttcggtaaatattctggagcctttgctatgtaaatagttggaaattcaataacagtcctgttcctaaagagctcaccaatgcatttatcaatagcatccaattcaacaagctcttttgaatcttgcatttttgttgtgttataaggaaattgcttggtataaaactttaatcctgccttcaacaaaatgtctgatctcaccttgttatctctacaccccttaacattatcatcaatagacatagtttgcacatctttagaaatatcgtatattagacaacatctctcataaactacattactcataccctctatcaaactggctgtctccttaaccttgtgactcacgtgaataaatggtacttgattagagtctgtttcggatgaaagctcattacttggacatacaatccattctatagaccaaacaaataagtctgaattcttatcccatctacttttattcaaagtagatctatacattccccttggcaataaaagacaattaacccctcttctgattactcgtgaacattcctcttcatatttggctcttttaaaagaactttgattgttattgccattgtttctgaaactttgtaaagttctcttattccgtttcatcccatctaatttttgaacttccaactgccttttaagattagttaaaaagttgaaatccctctgaactaaatagttgttctcatgtttttcatcgtctgcatttttcaacgtttcactagacacatatttcactggatcataagactgcccagtacatgaatccaattttttatgcgatttagaacattccagtgaacaggtcttcttcagacagccagggcatttatatttaaattcatttataccacatatttcacataaatctttaggcatcactatcaaccacttttttcagtttatttttctgcctagaggttcctacttaggttttaatagtggtttatttctttccaattaacctagctcctttctttattattttcaaattaagataataacaaaaaattttcagaactttaaaagatctcacgagatgacataactgaaaaaaagccaaaataatgaagaaactatcatataaagaaatatttttatatttttttactatttacatctatatgctatattgctaaataaacttcagaacaaaaattgaaataaaccaatatgaatcaaaatacctgatacataaacaatagttgttatcacactcagaatgagttaactgaagattagtgtgataatgaggaagaaagtttagtaaaatacgtgaaaaaaagaatgtacaaaaaaatattgataacatctaattgtaaattcatttctaacctctcttaataaatggatttaatgcacggacagaaagacatggtaaggccataccgatctctgctcttaataatattggaacctgttgtagttcatgaatttcttggatgtaacagtcattttcttttctaataacagtagtattaatgaatgcctctaatgcatcttcttctgaagagctacgttcaggtaatcttaaaacaggggtagtaatttggagttttgaaagttcttctgctaaagaatcactaatcatagaatcaccattgtcaatagaactgaattccatatttgcaatttcagcagtagtagatttgaatttattcttgattgaattcctatatgactttggattcctttcatcttctggaatatatgtagcactatctatgccacgttgccaatgtaattccagtattttcttttctccatcaaattctgccttgattaatggcaactggtcaccatgaaccctcttttcaataccaaattcagggataaacacatcaaatgaagactcataaacttgtaatactgtagccatagtaaataattgacctgttgcattacccatatcatttattgtcttacaaagtaacaaatggacagcctgttcctgagcctgataggcacaatccttcttaaaattacaatattctgcggtaattttcaaagaaccaacatcatcatcatatgatgtattattaataatagattttaattgtctatggacaacatggtctgcgtaccttctcaaaggttgggtaaagtgggtatagattggtaaatttaatgcaaaatgaccatattgatctggatcgacttttccagcaacaaaatatttagctctggataatgtcttaaacaaaagtatttctactccttttcttacatcatcatcaggtatttgcaatatcgatctaataatagtgtctggagatgtagtgtcaacatcatatccaaatttttgaattttcttcttgaaagtacacattttagttacaataggttgagcttgtcttcttaagaatgccttatcaccaagtttagaatatattctttcagctacagtacagttcactttcctttgaatctcattcaatatgatactccaataggatctgtcaaaaatattcaaatcaactttaactttttcatcatccaaactctcaaacagtgataagactggtgctagtttagcatcagtggaattgattctacctctataaaagcatgtagctatttcctctaatttacaatagaaaggatttttaacaccattatagatattttcaacagtggttatgtcaacaatactaccaggagttataacagattctccaatccatgtagatttaattttcaaagttttgacatctaatgtataaacaatcgaaatggctgcattctccttatttgccttaaaagttaaaccatcattcaaagcctgaggtaacaaattaacaactctttggggcataaatacacctgtggatctctttcttgctctcttgtcaagggaagaattagcatcgatctgctcggtagcatcaacaacatggcaccccaactctaaagtgccatcattatttgatttgagatgtaatgcaaactctgaaatagtacctctttcagtaaatccaatgatattaaaactctcatcaaactttgttctcttattccaattttcctcatcgattggaaatggctgataagtggatttttcttgacttggatcctttggatctaaatactcattagataagaaattgttatctctcaatatagaatcaatttctgtttttgtgtcgttaatagcccctaattcagaaaccaaaataccaaatgggtgtaatgaagtaattggccaacgttttatagaagcaacaaataatttatctgcatatttatctgcgttttcaacaaaatcctttggtgctaattcagttggaatagcaatcaatggaactttcttatcgataggtttaaaccatgcaattttgggtgcttgttgcgccttagctaccgaatcgccattattagcaacatccttattcttattattagctacttgggatggtctcaacaaacccaaagtcccactaaacaattggccaggaatacgatctagaacagcaacaacgtgccctgcatataaaggtttaaattggtcattaatttcttcttcttctactaatagtagagattgaccttcaacctcaacatcatcatttttcttttgggttggacgttgtttcaaagaaccctttctttttaaaccaattttatttgaggacatcatgtcattatcagtatcatttcttgacaacgaaccaccaagggtggatgtagaaattatgtgatcatcaccatatgtagatgatacaagagatgcactagtggttgcagcattagaagatatggcagaaccactaatatttgttgttgcattgacacttcctgaagcatcgttgtgatagtcatcattactattcaaattaacaaaatcttcttgcaaacttgcgtcttttcttctctttttttcttccttctcttttttagattcccaaacctcatcaaccaccaacaattcaactgcgaccaaatcaccttccaaagctctatttctatcctttgatccacagatataaatatctgcatccaaagtaccatcagttgagacccaggcgtcagatctattctttttattaacacgaagaataccagcaaccaatctcccttcttgaattaattgtggaatattagcttgtggcaagtaaggtgcgaaaagtgattttctttgagaaccaccatttgtagtattggattggaaactttgaatagacgagttggatggacgtgatctgtgaccttgttggaagactgctggtggctcaagactactaaaagaattaaagtctcttgaattagcttttctgtggccatgatagggtgactgattataagaataagattgttgctgttggatgggttgtgatggcgaaggttggaattgaggtgacaaaaattggttcgaatttggttgttgattttgagaaatggattgtgctctccaattcgaattaattccagatggtgaaaatggctcattgttattgttatttcttgtcctttgacgacgataagtagaagaagaagggataaaatcatcatcattgccagacgtatcataattggtgttatttggcggaaatttgaagaatggaaccgagttagagttagttctacgatgtgaacctgtgtcagtagatgaaggtggaaacttaaagctactttgctcttgagatgccaatgatgcaatgttattattcggatattcatttgataagttggaaaatgtgaaagatgtatcttcaacatttatgtcaatcccagttcttttagcttgttctgtagctgctgcctttttagcttcattaatttgtaaagagtgtcttcttgaatgtccatagacattcgatgatgaaccggttcttctatgaggattagtaggagtaccattattattattgttatttgaatttacattaaaattcgtattattatagtcttgataatatcctgaattatttctagaatgtgttctacttctatttccttgattatgattatgattattattattattattattattaaaattgttgtaattattaacaaaaggaggagtaggcattgaatagccagccgcttgttcatattgttgttgttgagccaatagttgctgttgttgctgttgaacttgttccaactgtctttgcaaagttaattgttcaatcattagattagtcaattcagattgcgttcttctatgagcgacatgaatatgctttgggacacgtctttgctggttgtcagagttgttagagcctcttggtgggacatacagattattagagtcattatcattgtcattaatattattactattataattattattattcatctcttggtaatttgaagaagacattatgcagtaaaggagcacagaatgagtgtaagtaatcgaaaaaaaatgggcccaacctagtgaatctattcaaaaagaaataatatagttaacagataatcacgaacacaaacaaaaaaatatctatctacctatctatattattttttttttttattttaaaacaaatttaacaaccagcctaataaccagccaagtgtctcacacaaacagatgaataaataaaaaaataaataaataagtaaataaatgaataaataagcaaacacgaagatatatgattaactttaaacggttttaacggtagaatctccaaaaaataaaatgtcaaattacaactttatcgaaatcgtgtggtgcttgctttaatccaggcagttctgtcttgtcttgtcttgttttatctatctagactaattaaaaaattattggttgtggaatgaatgaatacacagatatagatggatgaacggatcgataatcgccttttatttgctggtatctaaatagtgggtaatagaaagtgacatacccttgtaagataccttatatggtttgctccttaaggtgtatctctctctacctttgcctccttctgttgtattcttttcctacaaaatcttgcggcgcctctttctttcttccttttttttctgccacccccctccttccttccttccttccttctttcccttcttcccttccaaattgtcccaaaatatcccaatgttccattcacagttctgttgttttttttcgtgttctcttattttctttttttcttttttttttttgtcccactgttaacaccctgctgttgcacaatagaatagattaatcaggaaatttttctattgtacctatatgtctaaaaagggtaatgcaaagaagccaacaaaaaaaaaaaaataaaaaaaaaaaaggaaaaaagaaacaaaaaaactatttttagatagacaatatcctaattgggcaattatacccaaacagataatgtcacttcctacgaacggtatgtatggctttttcctgtatatacctacaattttatgtactacaattttataaattcattatttagtaattaaaatagcactattattggttttttcttttcttttctttttttttttatttttatttttttattttgtagcctactataaccaatattttgtcgttagcaatagtcattataaacattattttcaaaatttcaagtcctgttcttcctctggtttcaacttataaagagcgtccaagaaaccaacaatcaatttatccactaccccggtagtcttgacactaccggcaacaccgtacaacgcactagtaccatcattagagatgttcttcttatgatttggatcactcaacatctcgtatacaatatcagttaaatcttgacataatccatcaatagacttcacagttaacttagtcacagccaaatgtagtgccgcaggtttctgtaatgtgctcaaatgccaaccacgcttgtttaatctgtctgacaattcataaacatctactttttcagatttaaatgagatcacactgaatttaggatcaccaatgatttccaatgctggcaatctgtcttgtatatatcctttcaatttccttgctgctccaataatttctttacatgattcaatatatccagactcacctaaattgatcatggtggcccagcaaccagctactaatgcaccaggacgtgacccagctaatgtaggcgaaccataaagacctccaacccaatccgactcgatataatattgttgcatccttaaaatctcatttctatacataatcacagaggagccctttggtgcaaacccatacttatgtgtatcgcacgagattgaagttacacctggaaccctgaaatcaaatggctcaatatcctctccataccctgctttttccataaacgcaacaataaatgatccaagacaacagtcaacatgtaatggaatattatatttggtggccaaattcccaatacccacaatatcatcgccgataccatgaggaaagttgggaacagaccccaccaataacactgtgttacggttaatcatcctttccattttccttaaatcaactttatatgttataggatctaggtccacatgacgtaattttataccaaagtaataagctgctttattaaaacctgcatgtgcagtaattggaaccaccatttcaggctctttaataccgcgaaatctttcaccatacattttagcacttaagcatgctaatagaagcgattcagtaccaccagatgtagtcgtaccacaaccagtgtcttcaggtgcattgaacatttttaaaatcatagataccacttcagattccatcttacgcagccctggaaacacatctggatgtaattgattagatacacaaaatttttcaaacgcaagtgcttgtaaatgtatcaaatcttgaccaccatgatacacagcacctgaaactctaccatcttcccaatctgaatgtggaattgaggtatctaatttttctaattcattcaaaaccaaatctattgacatacctgttggtggtaattctataaaatctactatatgatcattatttcgaatcaattccttttcaatagttctctttgttttctgaatttcttgatccactttattcctcatgaacactgaagacaacagacagttaaacacatactttaaggatatacggaaacaacgttttaaagatccaaaaataccatacgcttttacatcatagcatatgttaattagtatcttgtagcaaaaatgtacaaacaaataatcacgtaaaataaaataccaaggggtcttttggatatagtcaattattgaaccatacacatattccaggttatgcaaatatacatatccaattttaattaactgttgataatcaacatccaacttgtagttattatcaaaccaacaataatcattaatcatatttatccactcatccaatttgggataaaagcgcataattaaattccttacttttagaattttcgtttttaatatataatataactaattttgttactctttcttgttctaatgtttttatttttatttttatttttttcttttttttaacgattgcaaataccaacaatagaattaatactttaggacactaaactgatgtatatcttatatcaaaataaaatcaagtatttttttttatcaaaaccagttaaagccaattgatcacattactacctcttgggtaggtaaatttcaattttcctatattctctttaaaaacactattatccggatactttggaaaaaaaaagtaaataaataaacaaaatacacttgtatcaaaagaaaaagaaaaacaaagacatatttcaataataaaatgcgttattcatgacaaaaacaaatggaaaatgcacaggttaaaatcatatgcaatatatataaagggagagaaacatatataactatattttatgtataatttggagaattagatctagttagcctgatacgagattctggcgatgagtttttagtagtaatacctgctgatgttgttgacgaagaggaggcaaacactacatttactgagttactagatacagaagatgatatcctgctttttttattctttgacatatttgtatgcatcttcttatttccctccacgaattcactattgttttgagaagtcggtttaaaattcaattcagtaattgtttcaatataatttttaagaaactgatttgtcttcttcatttgctgaatctctctttctagatcatatttagaactcaagagagaattataacttaattctgcccattgtgcgtttttctgtttctcttctaaaaattgtttcgatttttcccaattcttcaattctaacgatttatttgctgctgtattggaatcagtttgatatattgatctcaattcatcctcatcttctgtcttcttcttatttatctctagtaaatcatccagttgacttttcaatatattgtttttagtttcatattccatcatttttttatttaatagatcttcgtcttctataatttcttgaaataccgtatttaactcatcatattttccttttaaattgttataaataattttaattttcccattctcagtagccacactctcaagactctttcctgtatcattttttaatttttcccttgattgaaaaattttaaagttgccaccaatactttttttaagcgaatctagcaaattttgtctctctgtttcttctaatcttttatttattagaatattattattcaaatcatatatactattaatttcattcaatctggtcagagtcttccgcatcaattcaaattgataattcctcacattgaattgatgcaaagaaacatccaaagatgtcaatgcgctattataatttttttgaaattgtgggtgaaaccaatccgaggaaatttctttctgagcagcattgacatgatctgacagagataattgagtaccttgaatactgctatcattaatcgaagctagtgcttgtgttatcaattggttgaaatcgacattattacctctatgttcaataccaatatgctccctatttttaaaaaaataaaccaaggattttttaatattatcatattctgcgtccacatcttgttcattatttaaattctgatcaagaatatagtgatccggtgaatccattactagtaactttataattgggatctttttatatgacttgatcttctgtttctgtcgtttttgctgatatactgtaccattacttcttctgaacctcccattggcccgagtctgtgattgttgtccgatgattggaatatttaaacatggcatagtgtcattaatcattggatcaaatgcaataatcaagtttgtatcataacgacgcaacaaatcttcatcatgaattaaatgctttgtggtggctaaaaatatccagttccttttcatcccattatcattttccaacttccttttcttgttgtaagagttgtaactatttctattcttatttgtatagtaataattatccttaaaataacctgtatatctatttaagtttgaatttgtttgatttgaatcagatattgtattggtatataaagacgagggagaagtggatgtataagaagaagatacaataggtgatactgatgaagaggtagaagtagaagtagaagtagtgatagaagaagaagacgaagaagacaaattggcattcacctgatttccacgtgaataaacggttttctcatcatataatgttgtaccagataatcttttcaaattaaaattttgacctaagagaagaccctcgattaaatctaattctttcattgaatgtgcaacaagcgtgatagataacgaaccgaaatctttggattgataatttactaattcaaacaataatttttgtagaaaataaaatttattacttggatcaatcaacctctgtttaggttccattcttaaaaattgtcttggcatataatggtctactaataaacatggatgattagccactgctctaatatgtgtgtctaatagatatagcatttgtcttgaagtaaaagttggataatgtgtaccaatttgagcatgcgccttactagttaaaacattggcatcagatgacgttgtaatggagttagaagaagaagatgttatacccaattcttttaataatgtttcatgatggatagataatagtatttcaattaaatctcgttgaaattccgtgagtccaatcggaacagtgaaaacagtcattatcttaattaatttcgataataataattatatatttctgttgtgataatgaataactatatcttgagtttggtaaactttcttcaattctcccaaatcatatacaagatatatagacttctgtcctcttactttctttttttgttcttttcttactatatttgtttcatcttatttctttttttccttttttattagtttttatctttattttttatttttttctttttatatctttttgattttattacttttattgaagtatacatattaaaaagaaaaaaaaaatagcactaaccaaccatcctctttaatcagattaatttcatatgcagtgcataaaaacaatctagttagttcgtttacctagacctttatgatatgcctcttacacacatgcatacatagcaataacaacctccttcctccctactttcttctcctccctttctatgcatatataatattgcttcacactaatacaccctcttctttcaaccctccaagagttgtaataataacgttttttgtatcattattatcatcatagtttaatactttgaatacgaaatcctactatataccaacaatctacagaaaaaaaaaagatttatagactcattaataatctcactgtttaagcttgatgtaacttgaattctacatgacaccggcaatgttttccccctttgtaagaattgatagagctgaaaaatggctttatacagaagacatagagactggtcactgactacatacagttatctaaaggagatttcctctctctttctcttttttcgttcttgatacaccatctctatgtgctaccaatactacgactaacagttaacaactaaccgcatgccaacacctactgctatcccagccaaaaacagtagcacattgtatgtgtttcccctgtagctcctcgtccttactctaataccctcccttcccctgctactcagttcaattgaatttcaactgcaaacaaaaaaaaataaaaagaaaaccaaaaaaaagacttcatttctttttcctcgagagaaaacccttttcatttcgctgcttttcgattttcccaattacagaaaggaggaaagtttcagtgtatttggtataaggtggtgatgaaaacaattaaaacaaagaaaaacacacaagcaatgaaggggaccgtacaggttcaaattagcttatgttttttcccatacacatatgtacatagaggcttatagttgaggaataataactacaataataacagggaaccaaatcaaataaaatcaaaaaaaaagaaaaccacaaataagtaatgcaagcagccacccccatgaaaagtattaaatggcttaccaaaagacagtacccaccgtacatctatctcttccgtcatttagaaagaggtcaggtagtatatagtcaaactccgttcccaacaaaacaggatatagaaaacctatggcctcgcccaaaccaaaataacaaaaaacctatatatggtacccgtagagatctatggaaattgatgtgccttgttaaactacctaaacctgagtggagtctacaactatatagagacttggttcatttaagacatttaagagacattaaagggataaacacttacagagaactgaattccttcaaacaaatctggtatagtggacagtttagacctgtatatggacaagaagctattgctgatttaagagaatgtcttttaaagggtcctgttggtaactccgacactactgagcacaacaacaacaacaacaacactaacctagttactatctattgggaagatttgtggagaatgggggataaagagaaatattggaccaatattcttccacaggttgaacataaacaaatcccaagaattggcaacacatctcgtgaagagagtgggctacttaaactattaaacagagatcaaattagcaatagtgaaattaatgagaatataaacaacactacatcctaaactgtatcattaaagcttatataaaattagaaaacacgaagagcaaaaggaagaggaaagaatattcattcattctgaataatatatatatgtatatatacatatatatatatatatatttgtacaactatatgttcatgtaaataaacaagagagaaagaaggagaaagaaaagtaaaaagattaaaaaacagttataattaaaagcggatatgaataattagaaaaagagaaatattagtatatttaataataacaaaaaaaagaataattaaaaaaaaaatttacaagtctgctttcaataaattatttaagtcttgaactttggacttcacagagagatcaatagttttatcaccaacttctaaaagaaggccaccgagcaattctgggttcactttataatctaacttaatagtttgatttttagaaagtaaagaagaattcttgattgcttgagctaacctttcacctgtctttgttttttgcgattcagagttccaaggtttagcagtggttaacgtaacagagacaacacccctatattgatcaaataatttatttaggtctgtattaatttgtggaataaaagatagtctattattttgtgctaatgcttgcaagaagttggacacataaacattgttgttttgtttaacactttcattcaaagtactaactaacttctctctttgttctgaggatagagatgggttatgtaaagcagcagcaacacctggagtttctttaacgatggaagagatttcatctaatcgagagacaacttctggcaaacatttttcttttaaagcaacttggaataacgaataggcataagttccagaaacacctggtaacatatcaaccttgcctgtagcggtaacagctacaccggtatgagcttgtctaataatagttcttaacattatttattaatgtaaataatattgttaatttgaagtaacaaaaaataattcgaatatttatatatcttaatagtgtctttcctttaagtttttggcttcttctttccttcttttcttctttctttttttttttttagtcaatactaaaatggtgtctctattgaattaaagataataacaacccttctatattaaatgacttaaaagagagactgaggaaataaggtaatatgatggatgcagtttagaatgcacctccagatactcaaattatattaaaaacgatagaaatcaagctttattaaaaatcctttcttcgttctttactcagttattcaggaacagattacacaatccgcttaaaaaaacctcgaagttagcaattggacttctgaaaggcttcacactcttcattctgaacaggctaatagctgaaaacaaaaaaaagacaaaaaaggaataataacgtaagtgcttggataatattgttttttttccttgttacagttggctaaaaaaaaggaaaaataaataaagggagctgaaaaacaaatcaaaaaatttacaaaattctgtagaaaaattgaccgagaaccaataggaaagaacagtaaaaacaccggagcacgtgactagaaaaagaaatcacttgaagggtacggaagttttcacaagagatcatcaaaacacaggaatatataaagaaagcagtagacaaacagtttaaatttatttaggacaactaaagaataaagaaaaaaacccaactttggcagcaggcagtattgtattataacatacatatatacacatatatgtctgcatattgtgcaacttattgtactactagacgatgttgtatatgatatcagtagttctacctttatctactatacagcttatacattaaaagttaatgcatgatttatatttctgcatatgacttataactattttaattagttattttctctattatactttaaagtacaaaatccatatttaataccatgaatggttcattacaatatttaagaaagcgaaaaaccttttcttttctttttttttctctctctctatatatatatatatttcagctttctgttattcaaaaatcatctggaatattgtacaagatctactaaatttctttacatttcagttgtttcttgatatttccaatggtaaaaagatatactttttcgatttgtctatcatttgtattttttcttttccctttttttcctttctttctttcttatttttctatagttgccgttttaattattttgttgtttaattgttcccgtctaattaacaataacagcagagtgggatcaaaagaaaactgaataaaaaaaaatctaaaacaatcacatgtaaagcaataacaagaatgaacttgttcagtaatagactaactcagtgctaccatgaacagactcacaatgtggatattactatatatttattatgctgtatggcttctgttgccattgtttgatctcgaaaataaatattggttatttcctttacctagcagatatgcaatatatctccccatatggttgttactaattgggtttacactggttggactatgcctatctactataatattaaaaaattgtgacattgatcctaatacatatacattccaacgtcgtgcttatagtaagtttcattaactctatcttttttttttctcaaagaaaaaaaattacctgagagcaaatttcgctacattacattctaaagtcattagatatgttcatgtcattaaatcataatacataaataaataaatagatatatatatatttatgcataacgtccccttcagattttctatctatctatctataaatacatacatacaccaaaatatgcttgagttggaaaattgaaaaatattttttttattaacaaataatacaacacgaatttaaatcagctgatctcttttctttacttgaactctcaattgtttggttccgtatgagtgttcctgccttctgtggtatgctattgatattcttatcattatgcctataaaacctgttactaggatcaccatcaccgttgccttcaataatttctctggtctctacctttgaaccattcgatgacgtttttacggtattattatttgtagatgtatactgtgaaacatcactagatgtagaattttccttttcttttatttttgaacattctaccctttttgcagctttatattgctcaacttcaattaacgctctatataaaagatttttgatattaatgtttaatttagacgatatttcaaaataatcctttttagagtcaatttcaaatcgttgtaaagtttgcagtatatcattcatatctacacaacgctcgagcattaagtcaaattttgtccctgctatcagaactggtacattatcatccatcccacgtactctttcaatccttcgttggtatgtcctaaggttcaaaaatgattcaatattggtcaaatcgaaacaaagtataaaagcatctgattgtataatttgttcatttctaatatcagaaaaatctgcaatttcgaactctgctgtatccaacaactgcacctcaatagagtggacaaaagactttgaagtttcatatttcatatttatgtcctgtgctaaattagataaattaatcttcgtattatatatatcttccatataagtaccactttcgatattattaaaagtgtcagatatgcatcttaaaataaaggaggttttccctgataatgcatcacccattaccgtgattcttgcatgcctttcatccaaataacgaggtgacgtagaaccatctttgctatgataatcatacaatattcttgacatatctttaatttgctattttctttcttttatcttcctttccctttttctctctttttgttttgactattaccaagttaaactagcaatccaatcactttggatagcaacggtattgccaaaaaaaaaacttaacagacagctatgggtgcgacattgaataaataccataacatcaggttcatgaataaaagcagtatattcttattacttgcagagtattttagagtttatacatatttatatatactttgatgtgaatacgagaattacaaaatgcaaccattttcttttctttttctctttctattctaacagatgatactcaaatatttcaagtcagtgaattgttttccaatatcaatatgaatttttcttggttaataacaggaacaataattataacctagggcttgcaaattgttacaaaaatgagaattaaagatttcttgaattgtttggtttcaacttgtatgataaaaaaaaataaaacttttctagtaaattttctaaatctttgaaaacaatatcttcagggttgaaatgttatttttttattttattagaaaaatattgtcataataataggtcaaagaattcttataaaataatcggataagcaagaaaataaaattaccatttttaacaattggatccaaaagttttgtttcccaaacagtatatttactacgtaatttttcattttatgtattttattttttgaaaaaaattgaccaaacagttttttcattgtatcatttgattaggtctgatttataattattattacctcaataaaataacctgaattattttcttaggtgtttttctaaggagaaaaaaaaaagaaatgtaatacaatcatcattcacgaaactaccatatgattacctaaagaagaaaattggaagtttaagtgttgcaacacatacacattacagtttcttagtaataacaatatcatcctcctttgttgcttttcttatattgttctattttatttttccaatctgttttttgtaaataaaaaaatataaaaaaaaaaggatatgaaaacaagaaaaaatttaagtgttaaacaattaccaacggagcctgtcaaaaaattccttattaaggtaagctgttaatatacgaaaacaattgaataataaaaaaaaaaacaaagaacaagttttgtttttacactaaattattgttgtcaatagacagaaaaaaaattatatcggggtacaaaagttttcccccatacaaaaaagaaaacataacatgtaaaaaaaacaggaatccgattctagctaataagatataaacttatggtataagacactttttaattattgttctactaaaacggctcgcagataacatattaaccccggagacatgcagaaagtaataaaagtataactttttattgttatagcagcatatgttattattattataaaattatggtatgatatttatttttatattaagtagcttgtttatgtctcgttaagattgcctcataattaagataacaatgtatctactacttaacatttttttactttaattataaacatctctctctacagaatgataaatcaacatatccggaagaaaaggatagagaagaaaaaaatagaagtgtcaatattatacgaataatctttcaaaagaattgtgccaaaaaaaaagctcatgcctgtcatcagagggaagtatttttatttattcaacaaactttgttttttatgcgctttcttcaaatgaaatgcctcattttatcggtgtaactattttactcccttttactcccattattcccattatttctattattattactttaggcaatttattaaaacagttattatttctcataggaaatactgcacccaccccttaaaattttaattttattcatttctaaaaaattaacataatataattaaactatttagctcttccactatttttaattgaattagtttaaacagacagtcaattatctatcaaaaacataaaagagtaacaatgacaaaactttaatcaatatgtatcataagattattaaattctgtatattaatctcaaaagttagaatttatttttttattaatattgatttatactttgttattttttttaagaaacaaccagaagaatatgacttgctatattgccgttatttcttccttcccttaatcaggcctcaaattattccctagtattaaaacaatagaaactaagcaaaaaaaaaattaacctcaattaacagtatttattatcaaaccttccgatatgaaccttcaaacaaaatatacataatatacaaaatcataagttgatatagtattaacaacaattatgcccaatgtgttttcacttatatctagtgtcatttttatttatagaagatcagtgtctctttattttcaaaatgacccaacgaactagacaaagcaactatgtttttttggttaagagggccccttgaaaataaaaatatttatctgacattttcatcaataatttgtgtaagagttgttgtaggtaaatggatgaaccgtatcaattagtataaatatggacactcctacgtaagctctatatattactaattaataaccctgatgttgtattattacttcttgtttctctttttcttgtatgatattaagagttacttcttaatatcattactaagatgtatttaaataagatgattacccctgacatatctctcaataatcaaaggtctcttaacaagatctgatataattctcactccctgaatcagattcaataccttatatgagccactgcgcacatggtcctaccaatcatccacctagacactcaggtgttactctcggaattgcatatctactggatttccagttgggttccttacaatttgtttcactgagttatagttttaaacattttccaaaatctgggtttcccttctagtttgtccacaatagtaacaaaacattattttttatatattatgcttttgtgccaattcttcgaaaagtacagaagggagtctggctacttcaattgatgctcattcatagatatcaagctaattacttatagatatatatacggatttgtgtttaattaatgaaaatatttcttcttgaaaatgttataagccaaactaaatcttgcatgatagatctatttctcctatgtccagttattgtactctatcttattccgctcttccttagggtttgctatattttcttcataaacaatataccttaatcctctttcttttatatccttaattgatcaaaataataatgtcaattaagagattttggaacagttgaattttatttttgatactagaatgcgagttttctgagagttttattcagtaaacaatgccgaaagttttttccgaaattattttttccgcaacaagctcaaaaattgttttatttattgatttcctgatttctcttttatttacatcattgacatattagaataagagaaagccatatcaaatttatttcacccaaaatagtgaacagccttatatctacattagccgattagattaccaaaagcagacaatataatccatttactatacacataatacgctttcgttcactttccatggttgtgagtaatagtgctttggtgtggattcctaatgaagaacatacctttattagggctaaatttatctctgatgatggagccacagccaaatgtaatttaaacataaatgacgattccaatgataataatactgatcaaacagctacagatataaatacaattattgaaattcctttaaaaaatgttcatccggttaatccttcgaattttgacttgatagataatatgtctgagcttacatatttaaatgaaccttctgtactttacaatttagaaaatagatatagtcatgacttaatctacacttattcaggtctttttttagttgctattaatccatattgtcaattagatatctattcttcagaatatataaatctatatcatggattaaagaaagatatagataatactctcaataataatgatgattctgttaaaccccatatatttgccattgctgaaactgcctaccaaaatttattaactcaaaaggtcaatcaaaccatacttgttactggtgaatcaggtgcggggaaaacagaaaatactaaaaaaatcctgcaatatttagcagcaatcacttggcataatcaatctttaccatctgaacaatcttttgaaaatagaatcttacagagtaatcctatcttagaatcatttggtaacgctcaaactgtaagaaataacaattcttcccgttttggtaaatttattaagattcagttcgattcatttggtaagatcaacggagcaaatattgaatggtatttattagaaaaatcaagaattattcaacaacattctcaagaaagaaattatcatgttttttatcagtttttaactagcgtaccacttaatgaattaaatacaaagtttaaattgccttctaatgttgtcaaagattataagatactttcatcttctaaccaagtaatcccaggagttaatgaccaacataattttaaagaattaattgaagctatggaaactgttggattcacagatgatgacattcaatctattttcaccattatatctataatattattgattggtaatatagaatttcagtctgatagatcaccacaggctgcatttaccaatgacattaaaccattaactgaattattaggtgtatcaacggaagatttccaaagatctattgtaagaccaaggtctaaagcaggaaaagaatgggtctcacaatcgaaggatgccaaaaacgctagatttatattaaattctttatctcggatcttatatgaaaaattatttgctcatattgtggatcaaattaatctatcactaaattatcagaataattcagataatgcaaatcatatagggttattagatattgcgggctttgaaatctttaaagataactcatttgaacaattatgtatcaattacacaaacgaaaaattacaacaattttttaatcatcatatgtttatactggaacaaaatgaatacgttaaagaaaagatacaatggcaatatatcgactatggtaaagatttacaatcaactatagatcttattgaacaaaaaatacaaccttctgggattttacctttgcttgatgaagaatcaattttatcgaattcaacagatgacacattcttacaaaaattaattaatagttgggaaaataaatcagatcgatttaaaagatccaaactatcaaatggattcatattaaaacattatgcaggtgatgtcgaatataatgtagatggttggttatcaaaaaataaagatccacttaatgatgatctactattaacattaacaaattcttcaaataaattgatttcatcgtttttcgaccaagaatcatcaaacttaagtaagtcctttagaactacttcatatcgtcatagagaacaacaaatttcattattacatcagttgtctttgtctcatccacattttgttcgctgtattattccaaataataataaaattgcaaaaaagtttgatagatcattaattctagaccaattacgttgtaatggtgtacttgaaggtataagaattgccagagaaggttatccgaacagaattcttttcaaagaattttatcaacgatataatatattagcaaaccaaaatggttttgactttaatattaataacattaattataaaaagcaagctgaagtcatattatcttgccttcatattgatccaacgttatttaaaattggtatcactaaactattttttaaagcaggtgttttggccaatttagaacatgaaaaagaaacgatgctgataactattacatcaagacttaatagtaggtatagaggtcaccttgtgagaaataagatcaaaaatagattggtgagattgaaatctataagaattttgttagatgcatttcgtacttataatagattaatggaagatccctggtataatctatttataagagttaaaccttttttatcatctactcaggatatagttaagaccaaaaaatttcattctcaaattaaagatcttgaaaataaattattgcagagtgaaaagaataatactgaattgcaacaagataaagaagaattaaacagacagttaggatccgtaagggaaatgctaaaggcagaatctttgaaattgacagaaaaacagaacatattagatgatattgataaaagacgacatctgttagaaacacaaatagcagaaatgcgacaactttctgaatcattagaaaatgagaaaagagatattattgttaaatacgaagactctcaaactacaatctccaaaataaatgcaacaattttagaaaaagatgaaattatcaaagaattggataaggtaaaggttaacctcgaatctcgtttagaggaaatgaaatcttctttcgatgacaaactaaataatcataatagcttaattaaggaaaaatctactttagataatactataaaatctttacatgaacaaataaaatccaaagataatgaaataagtcagattaaaaggcaacttgaaatatcagaaaaagatctcgacataaagttggcaaccttagaaaaaaataccaatgcttcgatgaaaaggttagagacactaataaatgaaaataaagatctaaaaatacaagtgaataaatacaaaaaatctcaggagttattacaaaaacaaataaaaacaaaagatcatgaattaataagattaaaagataaaatacaaagttacataaacgatatgaacaaaatatcgcagcaacgagaagaaattattttagaaaatacccaatataccaatgagttaaagaatttacgtgaacaacttaattctattaaatcaaagtatgaaatattggagactaaatattctcaaaagaaggaggaagtcaacagagcatcacattttattcccggtaaatttgagatcgaaaagatgaaggaattacaagacagattagatcaggaaatatccttaaatagatacttacaaagtcaattaaataatacaaactctccaagcaggtacttggcatccaacagggataaaccaaacgaagaattagtaaataactatgatgaactaaaattgaaattaaatcagacatcttatgctcttcaagaagaaattgaaaaacaaaaagatcttattggaagattaagattcaccgaaactcgcttggcctcatcctcctttgactaccaaacagctaagggtcaaataaaaaaattgaggcaaatcatagaaaaagcaaaccttggtgttgatatagaaaaagaattgcaatcactaccaactgttgatgtaaacattgaaaagttaaacttagaggtacaacatttaaaaagacaattaaatttagaaagtaaagcacggattgatgcagaaaatgttgctgctgctttacatggaaaatttaataaaattcaaaaagatgattcttcgtctaatatttataagttaaagttcgaggctagtgaggagagagtcaagtctttggaaaagaagttaaggtctgtaccaaaaaattcaccgtcaactggtgatttatttaaaaatagacaaactgtatcccaatatgaagaggatgttagatcacagaaattggagaattataagttacaagacaccttactagaatcagataagaaaatcagtaaattacaatttgaagttaaacaattacactctaaagagactctattaaatgagcagatatccaggttggaagaaaatctaaatgattcagaaaaacaaaaaaaattaataatgtcaacaatgacacaacaaaaacaacaatatgaagactgtcttgctgatttacaagctaatgaagtccaattaaaagactacatgaattccttgcaacaggcagaagaagatgtaaaaaatatggccgatataattgataaattaaagcttcaaaataaacaaaaagacaaggtaatatgggaaactgaaacctctaaaaatgatatcgatatgcaactacaggaaagtatattagaactaaaacgtgtccaggatatcaacaagctgttaaaatcagatatggatcatttaaaagaagcattagcaaagggaaatgataatacacattacttaaatgaaattgaggcgttaaaattatctctctccgagagtagtagaagagaaactgatctcaaaaaagaaatatctacactaaattacaggttagaaacattaggaaatgagtctgatgccaagatttctgatcttttaaaacaaataagtcattacaccaatctagctgaggtattaagccaagaaagagatgttgctgatgcagctgaacagaatctacagaaagaatataatgaaataaattctaaacatgatgaattaaattcaaaaatgcaatttcttacaaatgaccatgaaaaacttattaacgatatgaatgaattgcaaattaaatatacagaaacaaaaaaattattaactcaatctaatggagagaagcacgacatgttgcaacaaatcaaatatttagaagaaacactgaatttgcaaaaggaacaaaatgaacgtaacgatgagttacttggtaatttacaggaacaacttaatcactacaaagaaaattttgacactgtcaaacatgaaaatattaatctcaaggaagagcatgaaaatatgatcaatagtaacgaacaattgcaaaatgaaatcaatacattaaaagaaaagttagaagaccgtagtgaacaaaataagtggttagctaaaatccatgaattagagacattagttaccaaggaaacagaaaaaaagtatgaagagatgaagaaacgtaaaaattacgaaatgattatagacgatttaaaagataaaaatgaacgacaaagcgaagttattcaactagcaaatgaagatagagatcaatttgaaagaaatatcttgcaatataataaacaaattggagatttagaaaagttagtttcaaaacaggaagtagatttgaaaagatttgttcgtgataactcctactatcaagaaaaagtatcagatttggagaaagaactagcattttggaaagataaagcaagtgatagaaacaataacatagatagtacatctaatggaacattctaaaataaaaaaagaattatgaacatgaattatgtatgtatatatttatctttaatgaattgataccctttatacaaaagtatatatttacagaaaacaagtggtgggtgatatggaaagatatataagcccatcgtatgtattatataaattatcaaagacattccacttttattattgacatatacacagaattcatgtatgttgcttctctcaaatggacctttggacttacttgggatattacttattaaagcataatcatttccctaacccatattctttcaagattgcttgtacatcaccaaaggcttctcttttaccttgcatgacaattgttggtttaccagtacctttaccaggattatctatttggcctaagaaaactttttctgcaacacgttttaaatcttcaggcgttaatttttctatttgattaatcatttcttgaactggaacctttttattatgtaattggatttgtctacccatatcttccaattccaccaacttagattccaagttcattaacaatgatgattttaattgatttttggctctgttaacttcttcttgggttaaagatagatgttcattagcaaacagattatagaattgaatagcaataatttctactgcctgccttgctgcctctggaacacacgatatagatataccaaacaacccagaatcagaataagagtgattaaatgattgacagttctcaataaaatagtattgatttaggacatgtgtgtaatttcttgaatacattcctttccctggaccacctgcactaaaggaaccaccaccaccaagtaaagtttgtaacgttgccaaagcataaatatcgggatggtctataggcaaaccttcaaaagctatctgtacatgatataattcaggcatggttccaaaagttggagcttctggaatacacgtttcaccaccagtgtagtgagcgggtttattgtattcattctttgagttaagttttgtggatttccaagaacctaaatgtttttgtactaaatctacggccatgtcatgtggtaccccgataaatgtggatacaagattctctggctgataaaactggttacggtatgtattcaattggtctttatttatggaaggtaatatttcccttggacataggagaggactacccaaagtttgccctgaataagcagtagtatgcaacaactctggtaaaattatttctggtttcaaccaagcttcatctatttcgtattgcattgaatcctttgtttctttaatctcttgtgtgcttaactgagggtatcttacagtttcagacatcaattgtaacattttttctacatcggaattaaacacggaagcctgatacattatagtctctctggaagaggtagattgataattaccacccaacaattctagggtctctgccatagttctccctggtatatttaatgtcgatttaaaagctaatctatccatcatatgcgaacaacctttcaattctgcaggcaattcatatctggatcctgctttaacatataatccaagagcagtaaaatgtcccggaacactggacgtgcctactgtaataccgttatccaatttcgtcaattggaaagtagaaaatcttctagtcaatgggattccttttaacaaagttgctctagaaggaacccatttatccttaacagcatatcttaacattggattttttttgtttatctatatgtatttacttttcttttctttacttaataaacataaagaccagttttattaatctagttggcttactcctatttctaacggtatgtcttcctgctttcacatcaacttctttccattaatagcttcttttgtttttctgtttatgattttgatttctattcaaattcaacgttttacccttttaggaagttacaagggttttgaatgagggttgggagcggaaaacaacttttcttttttttattttttatttttctttgcagtgttttcaaatcctcgaggtgtttggtattttccaggaaaaaattccgtacaacgtgattgtctggcaactattttgagtcatcgagaaatttttgtgaatcttgaaaaatttcaccgaaagtccttttaattaatgtaactggtgatgtctatcaatcacacacagtaatgttcattacttgctttaacaagtagcgaaggtcagtttgactgtctttatttgtttatttgtttgctcgtctgtgtcccattttttactgtaaacctgcgattgaatcatacgtttacttgtatgtgactaataataggtcctttatccaaccggttttttttccttttctctttcctcttgtgattgtcagttcttaatgttaaattgtatcattaaagataggtcgcagtcataatatataatctacaaaaagatatagacaatacaaacgcacaaacgcacaaacataaatatacaagtgtaagtaatgacccgttcatttttaatcaaagttcctgcctcaagtgctaatatcggtccaggttatgatgtgcttggtgtcggtttggctcttttcttagaattagaagtcactgttgattcttcaaaagcaagcgaaacaaacaaggatccaaataactgtcttttgacttattcggaagattctgaagggtacggcaacgttccattacgctctgatgccaatttaatcactagaaccgcattgtatgtcttacgttgttctaatatcagaaaattcccattaggtactaaagttcatgtccgtaatccaatcccattaggacgtggtcttgggtcctctggcgctgctgttgtcgccggtgttatgttaggtaacgaaattggtcaattgggattttctaaacaaagaatgctagatttctgtttgatgattgaaagacatccagataacatcactgcagccatgatgggtagtttttgtggttctttcctaagagccttaacccctcacgaagtagaaagacgtgaaatcccattggcagaagtcttgccggatccttcaggtggtgaagacacaggtttagttccaccactaccacctactgatattggtagacatgtgaaatataattggaatccaaaaattaaatgtattgctattatcccacaattcgaattgtctactgccgattcaagaagtgttctaccaaaggcatatactactgaagatttggtgtttaatttgcaaagattggccgtgttgactactgcattaactttagatccaccaaaccctgatttaatttatccggctatgcaagatcgtgtccatcaaccatatagaaagattttaattccagggttaactgaaattttacaaagtgtagtaccatcaactcacaaaggtttattaggtatctgtttatctggtgccggtccaaccattctagctttagctacagaaaactttgatgacattgctaatgaaatcattaacacttttgataagaatggtgttcaatgtacctggaagttattggatgttgctcgtgatggggccacagttgaaccattgccagttaacaacagttctaatgttgtcacacaagaaaatttagaataagttattagatataattaaaacataaatttgtatattattaataatagtaatagtaataagtgaatatgtatatatatatgtcgatatatatcatatcagaatcataaaaattttacaattgaataatcaatccgtagactgttataaacttatattcattatttatagtttctcttgctaaaatggacactcaaactctcttttctttctttctttctttctttttttctttttttaccttctgtaactgcctaacagtaggtcttcagttatattacacatatatatatacaacatgtgaattgaataatatatttttcatcatcatcttcttttaattcttctgttcttcacagctatatcacactaattagggcaacctgtgtttctttttctcagagaaaggaaggagaacaaattattaagaaaaacaaaaagcgggcaaaaattaaaaatatcaaactatcaaaatcgaacaaactgggcaaacgtcacttacacatatggataagctggtaacaaaaaaaaagagtcagctgttatgaatatttatatctccaaatttgcactttaatactttaactcaaaagttaaacattaatatctctactcatacaagaaaaaaattattagtatttttatttattaaatatttgcacatcacataaacatagatagggatttccatgtctacaatttctacaacttccgtatcacaaactaagtctggtttaggtttttctttacatataaaagcttgggttaattccatactagctacaatagtggttgcttatgtcctatataaactattcaagggtcatggtgaagatatcaatataggtaaatttttgactagatcatccccatatatgtgggcatctttagggattacattgtgtattggtctttctgtagttggtgctgcttgggggattttcattacaggtgcatcaatgataggtgccggtgtcaaagtcccaagaatcactactaagaatttgatttctattattttctgtgaagttgtggcaatatatggtctaattatagccatcgtgttcggctcaaagatgacagtagctaatccagagaccatgttttctaaaaataatctatttactgggtattcgttgttttgggcaggtatcacggtgggagcatcaaatttaatttgcggtgttgctgtcgggattactggagctactgctgccatatcagatgctgctgatagttctcttttcgttaaaatccttgtagtagaaatttttggttcgattcttggtttattaggtttgattacaggactattaatggctgctaaagctggcgaatttgaatgaacttactcaatcatctcattctattaacaagaaaaaaaataagataatatataaaaaaagaggatagaatcctttcagattatatatccatctgcatatgtatctattttgggtatttatacttgtgtagaaatatggatatatttgtaattatacaccagatacagaataaaatgatatttttatatatatttggaatttcttaacatacatttatattttttttttgttaaatatacagacatgcacatactgattatataatatcaacaatgaataatatcaacagtcacattatatcttttgtaatctgtaagaatctactccttttcttatgtatctgctttcataaatcttctttattaaaatttggattcttcttcaatattacaatgccttctaagttacttgtataactgatatattcatcattctctaattcagcacgctcaccatgacctagtagcacaggtgttgattgcgtaatccagccagtaatggtcttaggtttaccagcttgacctacggtttctacagcttgacctacacgaacattaactttgattggttcaccttcctcgtttaacgttataataaatttgggtctgacaccactattcaacatgtagaataactgatgatggactaacatgaaacttggagagaccataccaacaagtacagtcaataaagaggctaatgtaaccttatttaacacatgtgcgtcgttgaatatgtccattgtaagtgtacctttacccaaatgtaataaaccttgagctaatcttgtaataaatagaacatcctgttcgcgagaatagtagctagcaatttgtcttaatagttgggcaagacgtgcgttgttagtacctacaccacaaagacccatagccaaaatagagttcattgaaacatccaagtctgtgtcatgtgaaaatcttgttaatgcatcaaacactttcatttgtggatcagcgatagaaaccaaacccattgctaatggaaccatacgacgaatatgttcattaccatagtgcattaaatgaccaaaatgacgtaaggacatttctttaccaatgtcttcaccaatggcaattaatgcaataccaagaacagcaaatgctaattcatctattttgctagattcaccatctttttcctttgacttatcctcatggctatttgtatccgtttcttccttcacattattcacttgttcttcacttggaccagcatcaacagaaggttctggagtcttatgatcattttcttgagtattgctattgttgttatcatcttcaggggcatcaacatccatattatcgttatcttcattttgatcttctttattacttacatcattttgttgacttaaaaatgcttccaagccaccagcagcggtagtagaatcgttttcatcttcatcttcatcctcttcatcttcacctggcttggtcattgcttttggagttaaacgatgtaatagttcttgaattaacaagacatcaccagaaccacagaaagcacacgaattaattagtacctcaatggcggaagtcattggatgtttaattgcatttaaagtctctacaacgtcatctacttgttcaccttgacctaagtatagaagaccaagtgataaagcaaggaatctgatccattctgtgtttaattccatcacattacgttctaagaaattatctaaaatggatgtagttatatcaccattacatgtgccgacaaaaatatgtgataaggccaaacaagctatggttgcagtttcaataggcaaagaagtatcagatgccaaaggtaataaaatacttaacacttcctcattttgactaccagcaaatgcaataccaagacctagaatagcagcaaaactgatcttttgattggtatttgtcacatagtcttgtagtaataatagtgctggttctacatcaccatcatgaatacctgtagccgatataccaatacctaaaagagcacctgctttgatctcggtctcttccacatataaatatttatctaattgttgtaacccatcaaggttccactgaaagatagaaccaatacttgccacagcagaagtcataccatcaccttttgtcttataaacccagttatcactatcaacaatcattttatctttacaataacccatatttaaaaaggaattaacaaaggatgcagccaaattttgttgtgcagaatctaatccagaattattgaaaagagatttcgagttatccaaatgagatttgtaaatgtcttcgggaactttcggttccaataggtttagttctttgaccaaataaagaaacagttcagataattttgtgttaccgatgatttccctcaatgaattatcggaatcgttatttccatcaagttggattgagattctttgagttgataaaatataggctaattgttttaacatgattgggtcgttagtcaaatcgaagattgatttaattaaagtctcatcatttaatctaatagctaaggataacgcatcagtccattcagaatggtttaaatagatagtatacgcagtctttaagaaagatgtgttgtcaggtgaaggtaacaaaggaacacatgcaaccatatattggcatactcttttataagtgtcattatcaacaaattgaggtaatttatcaattgattcgatttcaagtaaaaggtcgacagcatcctcttcaccgttatgctttaaaaaataaggtacgatgtttaaggacaactgtaagatatcatctttagagaactgatttgcaatatattgtgtttcactagatattgtggtgtttacagttgtattattcttattattgttattgttgtcattgtcattgttatctgtatcattattgacagtagattctaattgaatttgataaacttcgtcaatctctaaagctaaatgacgaatatattcatgaccccaattttgaatatcatcaaagttattggataataacctgaatttaagtgaatcatatttaccattatcgaaaaaagtcattgctagaacagacaaaatatcagctaaagaggattttaaacttggatctatccatttatcataaatttgacataacaaatgataatttggacgtaaaaattttaaaggttttggtacagctgtcattgaatttgttgaatttttgataaacatttttaattggtttaaagaatttaaatagatttgggtatcgtggttatcttccttcaaagtctccactaacatctccaaatcgtctttcaatttttggtcttcttcagataattgttcttctacattgtctttgtccttgttgttagattcgtttacttttacactatttctttggtcagtcgcaggggctaaagtggactcgttagtccccttattattatcattatcattaccattattattactcattttattgaaatgctttgcaatggttatgttttacagaaagaaaaaaaaaaaaaaaaggaaagaaaggaagaaagaggtgagatatgtataaaaactaaaaagagggatgtataatataatgtgagatataacttatgtctttctctctcttttggtttgtactctatatgctagtgatatgtgattttcgaatccaatcagtatcaaaactgaaacaacattaattgaactctctctttttgaattcttattatttttgccactgaatgggaaaaaagaaaatatcctctttcttgtaaaagaaatataaaaaaatgaaacaaagaagaaggaaccatttttttttttattttttcctcaaataccctaatcaagccctaaactaagtccattagtcatgtgaccgcaagaacaaaacactgtaataatgcattataagtaaaataaaaccaatactgtttgacccatcatataatgaggatagcatacaagtaatatatctattaatatttatacttatttataaatacatatatatatgtatatatgtatatagttaaagaaagagggtttaagaatgaataatgattattgatgttcttcaatccattgcttccaaggatcaatattttgttttaatacactgccacctaacacttcaactgaagtttctaatgaatcaaatttaaatttcaatggatctgggaataagtcaaataatgggttatcattggaattatcctcattataagtatcactaccgtttatatatcttcttttattcatattagtaatagtattagcagcagcagtagtagtagtagtgatatcacttttgtagctattactattagatggatcaattaacatggatgatttttttcttgaaaggacttgcccaatttttatttctaggagagatttaattttattgggtggtctagagatgaaactttcattcttgttacatgcaatcaataaattagttgggtagctaagttgttctaatttatctagaatgtatattaaccattccgctacttgttcccaataatcattactagtatccgatttgaaatcccgcgttgaatcaatcataaatattatgcctttcaaatttttattattaccattactaccagtattactattatagttatttggattggaagtaactaagtctaaccaagatttccatttataaaccagtttaatgtgtccaggaaattcgattaaagtgaaattgtggttagtatttttatttttattagagatagatatttcttgtgatgtgacaaatggtctaattttattagttgtcaaaaaattgaaaaaggtagtcttgccgctatattggggacctaatataacgaatgttggagtattgattaaatttttgctatttttgttgttaagtatatttaaatcattacttaagagatacgtattattttggtttcttgaggatgacagaagatatttaaatactgtccataatacagttattattatcaacaatactgtaccaataataatagaatacatgttattgtgagaggatagttaatagtgatggtggcaatattgaaagtatcttttcttcttgttgtgatctttcacttttctactttctggtaatatcataaaaataaataaataaataaataaataaataaataaataaagaagaaaaaaaaaaaaggaataattagtcaattatatgaaaacagtatattggctacatgttctgtagcatcgctgattgaataaaggaatcaatgaacaaataaaagaaaatagaagaaatagaaggaaaacaagattacgtacagaatgatctctgtaaaatggtatttatacatccataccttctccactatttgcacatgttgtcgtctttcgtagtaaatgatgtgatacccagtttctaaagagaaataaataaatgaagaaaataaataaaaaaaaattaagggtgcctctgttagccgcccaaatttgtgtgagaagtctcttgacaaatcttcttgaattataaaggctgtgatcaagaaatgagagatgagaacagaaagtttttatttcatatagcataaaacatgtttgtgtttgtgtttgtgttcgtagtaatagtaaatagtattgccccatttattgttttatttaggttttagtactcaaaaataagttctcttttttttctttttttttgggtaattgcctatgtgatcacagctgtatacgtaataagttgtgtaattgtataattgtattattgtattatcatattgttatattgaataataaacacaaacacaaacacaatacatacacaatagcactgctcttctctctctttttctcgattctattgtttgttgtttatattgttcttttcttttttcatcacattttctatgatttctcttttttttctctttttcctccccttcacctcattttcttattagagagcgagtggtgtatggatgtttctattactgtctccgttttttagcgctttttatgcttttatgtttttttttttttattttgttttattgtaatttttttgaagatcattctagtgactggcagattctcgagaaaaagtctaagagattgtttggatgttgtcgttatcattactagtactaccgcgattattgttactatcactctactaatgttagtttaatgctttcaacaaacttgtaacattagtggcttctattaaacttaaattttgagtttctttctatttctttctcttctgtttaattatatatttatgagtttttaatattacaaatcatttgaacataaccatgtgaaaagtgtaaactattctttttttgtttattttattctttttttttttggtgtgtgtgtgtgtgcttgataatacaaaggttggataatactactaatactaataatatcaattacattaatacaattatcaaatgataaggcatttttcaacaagcacaatatgtcagtcgtcattgtctaaatatttgccaaagactttactaggtcacactcttagaggacagattataatgagtcctcaattagctacagtaataaacaataatataatttctaaccatttacctaacaacttaagacgtatcatacaaaaattctatatccaattaaaagaaacagaaatgttccctgtggttaaaacccagctggagactgattcctttatcggtgctttcttccttagagattatgcatcttgttattccgttttatatgaattgaaaagaagatttgatttgatcggatttgctcctaaatctatccttgatgtcagtcatggtccttctacaggtatgcttgtactaaatgatcttttgaataacagtgtccataaagacaacagcattcagaaatcttggggtgcagaaagaaaggactctgtaatactctctagcagtggagaaatgtcaaggagagccaggatgttgctggatgcacaaccattggagaggcaggttcagactaggttattgtcaaccgttcccacctcacttaaatacaatttgattattttgaaccaccagatgctaaaggacccccgtaagtatccgtatgaaatagattcgcaattgaaccattatttgtctcttttatctgatgatggtgggtatcttgtcattgtagaaagaggtacacctaccggtgctgagaccgttgcaagggtaagagaattgattattcgtcagaacagttctttaacagctacgacaggcaaagataacagtgttggcggtgatcaccaccaggactactctataattgccccgtgctcacatatgaacaaatgccccttacaattaggtaacctaaattattataaactgaatgatccaaacgatagtcaactacgtaaaaaattgaaatttatctcgtttgaaaaaatggttcaaagacccaaattctctattgaattgaaacgtggcaagctgctatctttgtcttggaataatcaagatagaagaaagctattaaacctaagaggtaaaggtagacccaatggcaacaactacgaattggttaattatacctatttggtcgtaggtaaatctgttccatcgttagaaatggataattggccaagaatcatcagccctcctattaaaaaaaaggggcatgtcatcttaaatgtttccaccgttccagatgggaaagttgaaaattggattatccctaaatccatgtcaaaggaaatttaccatgacgcaaggaaatcaaaatggggtgatctatggccacatggtgcaaagactaagattccaataagaaacaggatagattttgaacatttgaaaggactcgaaaaggaccgtattaaaaatttgaagactgaagaacgtaaaaaaagattagaactgaagaaaagattaattgaactggatcaggtcaaagaacctacaaaggagaatattaatgaattagcaaatatctataaaatgttgttataaaactacaattgttactacgcgtttttgatatttaacatcataacactcctttttctgtttgctcttcttccctttctttttcttttttctttagttttccttacatattccatgtaaatataaataaattcattcatcactaaagatacatatatataactatgtaaatatatggatacaggtatagatacaacaggttgttatacaaaataaattaaaaatacataaaggtaaaaataccttcaaatgttcagtgattttatgactgtaaatatcatgagcatgctctaatgtctttatatcataattgaataatacaaccagagataaatagacacaaaattatatttatatagtcataaatgcatgcatataaatgaataaaatagtaaacctaaaaaaaattacaaaaaatataaagatcacaacgaattcccgctgcaatactttacacttgtagattataatcaagaagtgatattctatattgttattgttgttgatgtagtaaatatgtatatattatttaaagagaaatcattatgaatgttattttcttttcaatacacacgtttactttcttctgaaagaagtaccttcagataatttagccttaccaccggttggggtacataagacagtggcacatgattcacaggtgactgcggtttgagcatgagagaagacagtagtaatgtttaaacaacctggacatttgacgtctaagaagtaagatcttggagcttggactaaggtctttaacttgtgctttctagcttcagaggcggcagttgggtgtaataaatcttgaactaaaacctattttaataaaacatatgcacacatatgcaaaacaatcaaacgcaaacacacgttcaatataaattgtatggaattaccacaataatgcattagaaacaaaaaacagagcatcaaaggtgagatatatttgttagtaaaccacgattcttcttagaataactaatgagtttgtatctcataaaattttttttcaaaacaaaaaaaaacaaataggagaaaatatacagatattaccgctaactagtaaattttcctgttatacatttcagactactttcttcttaaaacatgaggaagtaacatgatatacttttacttatcatctaacgtcctagccaattattattctacaatattagcatgtatcttattatccaccaaccactctcgactatatttttgaaaaaataatatatagagtcataatattcaacatcttagtctatcttactcattgatatcattttacataagcaagcactttattcttcatgtattcgatgtctcttaatctgtattgaagttttgctttggatttatatggttcttgttactatggttttcattactgttactacataatcctgtttgaacattgcaatttactcctgttcattgtcatttttttattagctctctgattttatcattattgtacataccatcctgtatatttatgctctttatgtgttggctcttatgctacgaaggtatattttagctaatggcaagcaagattctcctttaagtaactatacattagaacggacatactattaccacatatactgtaatagcaaactaaacaactacttttaccacacactcacacacatacacggcctctgtgaagctacgcaagtcattgcaactgttaggttatctcgtccgtggcattcctcctacctctaccatcaacatagaacgacaaaacttaccaagaaactagcttctgtaaatgtctcagtgtgtcttctgtccaagtctcatggactttaagtggagaccatatcatattacccacctaatcaaacagagattaaacgggtggaatattggtctactgaaactataagaaatgaactgcgtaggaataaacaggggacccctccaccagacgggggagaaaataggaaaacgagaaacaaaaacagatgagaaataaaaaatacagaaaggaacaaaatttatggatgcaaaaaagaattaaaattgttctatttgcctatttgggatataagaaaaagcgtacaaaaatgtatgggtgtaatattagatattctaaaattttttttcttgtgaacagtcacaattagggcaaaaaaaatattacttttagtaggtgtgctgaaagagaaaagccacaccgggagaattagctaattacgtttagtattgacgaagaaaaatattgtaattggtaagtagttataataaatactgttgtatatagaaattgtaagaaggatcgactgacactttatgttttttttcaattgaaggagacaaagagttcgaacctgcagatttcggcatatctttgtgttgaacaagtacaagttttccttacagataattacaaaaagtttgaaatattcagaggcgattttacagtagggggagaacaatggtgcatattaatgagtaaattataccattgtcataataaagtttgatttacattttcatatatagaaagccttgaggttggaagttttcctttgacaattaactttattagagtataaaaatatcgttaagtaaaaaatatattattctgttaaaaaatgtattacaatcctttgtaaattgaagcatatgacgagtacatataggtatacatagtttggtagcatgtatacatgtatattttagtatgctgcaatttgaagagaactgttttcttcagataatctttccactaaatttgctgattccacttataaaaagatgaattttattaccataagaatacttatatttaaagtaaatttaaaaaaaaaaaaaaaaaaaaacaagagtaggtaagaaaactttgacttgtaaagatcaaactatattttataataaaatacgatttaaactacaagtattttaatatgacaatacataatgtaacttttacaccgtttataggactttgttggctcaagtagataaaagaattaaaatttttagattagtagtaacttgttttgtgttaagagaatatgtaaaaattatattcaagtatcctcaccactggcaatctcttcgtccgtatcaaatatggatcttgggggtacggctgtttttatatggtgaatagtagaatatgtattatcgttatttcctatattttcgcactgattaataacgatattggcaacgtcgcttgtaagtaaagtgtaaatcttaggttttgaggagatcgatgtactttcaagctcatgtaatattgtagagtttgagtgatccttaatgtgaagggcgttaggggtaagttgaggcacttcttcacatcttgaataatcaaattcaggtgggggagaacttggaggactaattaaaaataatttatcagagggcggtaatttaagatattctttttggtcttgatttatgctattattaggattatctggatcaaattttattccatgtgtattggttaaagaataactaaattgcaagtctttcaaaatgggattgttattgttttgcttgatttcagtttgaaacaatgtgaatacataacttgaaatgtccacatctggagatatgattaagattcttttaaattttcttaatatgatcaattcaattggattatcaggtaaaattttataatttagtaggattgtggaacctagccatttttgtaaaattttcacaatattaggtttagtgacatcgaagtttttttgattcgatgtcactataatcgtatcagtcgtcatattatttttgaaactctttcacttaaatatattgtttttaacttgaaaatcaaagttcaagcacaatgatagcaattaatagagaggagaaagcaaaggatgaaaataataagtttttgtaatagtttcttattgatagatcttcaaaaatatatataaaaataaaagccgtagcaaaatatatatatatacataaaacaattctttcaattactttttttcttgttgtttatccttttctttgttgttgataccctgccttagtttccatgtgtatatatttgtaactgtacgttccaggtatgtctgtcaagtaaaaggcaagttgtcaagttatatttaagtttctagtatttttttttttgtattcctcttaatttttcgttttttaatcttaaagctcgaagtccgagctaagccatttttgtttacaccagagtgatatttgtatatatgtcataattgagagtatatgatatagattagatacgagtagggttcaatatgtgtagatatgtttaatatgtggaatatattgttactgaccctccttcatttatttgtacgatattattttccattagtatttgggataacatatacacagtaggtggaataaataagtaagataagtacactactaggggcacgatgatgaaattaatagggcctaagaggggaactgcagccttgcaggttgcatcaaaaatattccatagactaaatatggtactacaatgtgttccaacaacattaatttttttaggacaaagaaaattacaaataagaaatatatctcaatggtcatctctagtatatttgaataataagcattgttcagaattaatgaaaagaaaaagtttgttttattcaagtattgcctctaatagagttagaaccttgataaccacaactaacctctcctgttttaaatgtagcagaaatcctcaaaaattaaagtatgtatataatttttttttttttgacaatatttgacgtgtaacattaatagcattttctatccacaaaaagacaaaaaagaaaaggtaagaaagaaatggggtcgaacagaaacagagatatatttgtgtctgtatgatacgatacacgttggtctcaatacatctatctacttatctatctacaatatctctctttagagagaaatatcagtcagtgattgagaactagttggaccaggtcacatgattttcacgtgactaatttgtccctttgctgttgcaactttccttttttttgtgtgtgtgttagtcccttgatttttatctattactgattaattgattgataacagacgaatagattatatatatagacatataggtatgtctattcgtatatccttttgcaagctgtttaattattgtcttacgtttgtctttttgtagaaattgaaacttttttgaaactaacaatcaattctattttaatcgatatattcatcataaaagtaaaaaggtaaaataaaatagaataagatatttattttattctacttttttttcttcttgaaacttttcttcatagagcaattatggatcgtgaaattttaccaaggaatgttaccccattgcattatgatttgcagatggagcctaattttgaaacctttaaattcgagggtattaccaccattgatttgaaggttaatgacacttcaatagatacaattagcgtaaactctgtggacatcgaattccattcggcttctattaatggtgtagatgcatctagtataaaaactgataaggaatctcaagtaactgctctaaattttccgcaaggtactgttaaaaatgaagccagagacacggatcatattaaattgaccatcaaattcaccggtattttgaatgataacatggcagggttttatcgtgcaaaatatgaagacaaagctaccggcaagacaaaatatatggccactacacaaatggaacctactgatgcaagacgtgcattcccatgttttgatgaaccaaatttgaaagccacttttactattacactgatttcttcccctgaattgactcatttatctaatatggatgtcaataaagaaattattgaaaatggtaagaaatataccacttttaatccaactccaagcatgtctacctatcttgtagccttcattgtggccgaattaaaatatgtagaaaataatgagttccgtatcccggttagagtatatgctgccccaggtgaagagcatctaggtcaatttgctgctgatttaaccgctaaaacattggctttctttgaacaatcatttggtatcaaatacccactacctaaaatggataatgttgctgtccctgaattttctgcaggtgcaatggaaaattgggggcttgtgacatatcgtgttgtagatttattactggataaagaaaattctacattggatcgtattcaaagagtcgctgaagttgtgcaacatgaattggctcatcaatggtttggtaacttggttaccatggattggtgggaaggtttatggttaaatgaaggttttgccacttggatgtcttggtattcatgtaatgagttcgaatctgaatggaaagtctgggaacaatatgttacagacactttgcaacatgctttatctttagatgcattaagatcatctcatccaattgaagttcctgtgaaaagagccgatgaaattaaccaaatttttgatgctatttcttattcaaaaggtgcttctttattaagaatgatttctaaatggttaggtgaagatgtttttatcaaaggtgtttcacaatatttggaaaagtttaaatatggtaatgctaagactgaagacttatgggatgctctaactgctgcatctggtaaaaatgttactgaagttatgaatatttggaccaagaaagttggattccctgttatcactgttaaagaagagggtaatgaaattacttttacccagaatcgttatttctctactggtgatgtaaagccagaagaagatgaaactttatatccagtctttttagctttgaaatctaaaaatggtgttgactcatctttagaattgaaggaaagatctatgacagttaaattagatgatgtagatttctttaaggttaatggtgatcaatctggcatttatatcacttcatattctgatgaaagatggaaaaaattagggcaacaagcgaatctgttatctgttgaagatcgtactggccttgtggctgatgtgaaggccttatctacatcaggctacacttctactgttaatttcttggaacttgtatctagttggagagatgagaaatcgtttgttgtatgggaacagattttgaatagcatttcttcgtttaagacgacctggatctttgaaccacaaaatgttacagaaggtatcaatgcatttgttagagatttggttaccaaaaaaatgaatgaaatgggctgggatttctctaaaaatgaggattttgccactaagagattgaaagtgacattatttggtgctgcttgtgctgctagagaacaacaagtggaaaaagctgcaattgaaatgtttgaaaagtatgcagctggtgataagaatgctattccagctttaattaaacccgttgtatttaacacagttgctagaattggtgggaaggaaaattatgagaaaatttattcgttatacaagaacccagtttccacagatgaaaaattggcagctttaagaacattaggtagatttaaggaaccggaattattggagagaactttaggttatttatttgacggtacagtcttaaaccaagatatttacattcctatgcaaggtatgagaacacataaagagggtgtagaagccctatggaactggactcaaaaaaattgggatgaattatcaaagagattaccaccaggtttgtctatgttgggttccgtcgtcatgctcgccacatctggttttactagtcttgatgccaagaaagaaattaaacaattttttgacaacagatctactaagggttttgaccaaagtttagcccaatccttagacactattacatctaaggcacaatgggtcaacaaagatcgtgacgttgttattacttatttaaaagagcatggctactacaaagattagttcaggaatgcttacataggtatactttgatgttatttcgaaaaaaaaattattactgttttttttaaagctagttaaatatactgtattcatgtaagtaagttcaatatatgtttattcttttatgcttttatgatttttcctttcttcttaaaattgaatgtacccttaaaatggtaagtattgttagtaagttttatttgtgggtctaccagtcacccttttattgaaataattcattgagaaaaagctgagttttgtagtattgatgttggtagtattctttcttttggggaactaatactcgttctgatatatcagactcttgtagcagagttgtacttagttaaagaaatattagttaaatcttgcagagggaaagttggtattatatcagacttcatcacaggaagagactaaaatctaaccttaaataagacctagctacattcttctaactaagtatgtttgtcttttctatcttcaatagatgaagctactttatcgttttagttgcatatacaactttgtatcacctaaagtttttcgcgtttatccatctttttttctcttgataaatttaattttagacattagtagaatattctttgaaatcatcgaaaatgatagcgtacatacagctcaaaacaaatctttgaaagaaaaaaactttgagaaacttttgcaacttgaagccatagaaacaaattataaccgctagtttatttcctattggtcggagtcagtaactgctactgttcgtcattaatttaatttacaaatccattaatcaataaacaaaatgacgtataaaaagttcatttttttacctaatgatggtgatttaccagacaaaatcgaaatatttaaattcccagtcccatcaaacaatacaagtaagttacagttaagtttatttttacataacgagcgattgtatcaaattcaggattattcatttagtaaaagttgtaaatataaagaaattgagaatttggcctctgagaaatatcattacaatgataatggtgagcctatcaaatcagcatttttgataaatgaagcagataggtctgatggagagattatttctagtagtgtgtttcaaatcagcacattatatgatttggcatttagcttaatttctgtcttttacaaagagagtatttcaaataccgaggaagaatatgttacaaggagttttcctgattctaaaaaattgtctaaaaagatggacaataggtttttaactgttagagatatacatgactccttagtggatacacacgacacgaattggagtttgattccgatgattttgttagaagatgcgcttaatagagttgctcaatgtactgaagaaggtggtgatagatactataaggttactggagaaacaataacggagtttttattagataaagtggagaaaatcgtagataattttccacaaagtttacctttatcgttggaatatccagaagatattcaaaattgtcttaaatatattatggcttgtaatttgttaatatctttgataccgtttgatgcatataagattttacttaaatcacccaagatagaaggatttgttcaaaagtataatgagtttaagaaaaatagtattcaagtatcaattgatcgtgctgcactaacagaaagtgctataaatgttgggatacaaaagagcagtgatataattaagaaaaaatcggttaaagtagttaagaagaatacactcgttaacaagaaaaaagttagtgttggtaaaggcgcgattgatgggttttttaaattacaaaagaaagcagatagctagagagtagataaacatcttaaaaaagaagaggaagaagaagaagacaaactctaaggattgaaagctttaaacaaattaaatatcatattttaaagtacttttatcaatgtatatattaatatttaatggcgtgagagagaaaatataagatatatgtatataatgcaaaaaaaatgatagaaaaaaaaaaaataaagtaggaatcaaaagattataactaaaaaataaatcagacaagataattatttcaccagacgtcttcttgatatttaccattaaccttcatagccttgactatttcagaagcatcttcaattgaaacacctttatcttgagcgatcatttcacagatggcatgttgaacatccttagccattcttgcggcatcaccacaaacataaacatttgcaccttggtttaaaagagctaagacatcattttgacgttctttcaatttatgttgaacatagcattttttatcagagatacgagagaaagcaacaatcatttcgaatttaccatctaattgagtggagtattgaggccattcttcttcatacaagtaatcattttcatctctacaaccatagaacaacattatcttacccatattggcattttcaccagaagtaactgagtgaactctatctcttacgaaaccacggaatggagcaacacctgtacctggaccaattaagattacaggaaccgagatgtctgtaggtaatttgaaagcagagtgacgaacatggattggtaaactatttccaccatataagttacgtggacccataatatcatattgaacaggcaggattttggtagattctggggaattcatgtgtaaggaaacgtttcttaataaattagtggtgacacctaaagttggtgacccagtcaaatcatttggagagttttccacgattgaggtaacgtgaatctttgttggatcagcattagacgaagaggagatggagtaataacgtggggtaataattggaagggtttcaactagacattcccaagggacttgggaccatggttcaccttgagatagaaatagtaacgcatcagctaggttgaatttcttagcggtgatttcctttgcaaacccttctttatccttggataagttgataacgtattgtttaatattatttggggcgaattcggatagtacagaaagagtttctctagaaacaggacctgtgatttccaaataatatctaacagcagtttcgatggtagttggacatgggaatggagctttcatagttgaatctgatggagtcatattgaagattttctttggatctaaaccaaaagtggacatgaactgttccactttttcgttggcattaaatggccaaacggctacatgatcaccggtttcgtatttgatactagaaccagagatatcgaattcagtgtgaatacagtttctaccaacggatttgaatagttccttggatgcagtgattttagtgatcaatggatgtttaatattagccacatttttcacttcatgatgaggtaagtaatcttcagttaattcccctaggtaagcgttatcatcaatggaatccaaataagtgaaattgaaagaggatttgaaaccattgttagtctctgataagttaatgtgttcatgtaaggagtcgaagatagcttccttccaagacaaataatcttcctcagtggtacccttaccgtcatcaccttcacctagttccccaattaaagtggcgccagcagccaacaacattttcaaagttttctttgcagccatattaaagaattcataagtgttgttaccaagaccaaagacggtaaattttaaatcaggcaattgggcactattcaagtattgttcgaacatgacagcaccatctgggaaatcaccttcaccataggtagagacgaagaatgagacgacgatatcggaaggcagttcatgtagattttccaaatcagtgttttctacatctttacacaaaacatttaaattgaattttgattttaattctttagcgaatcttttagcataatcttctgcagtaccagtctgggatgcgaacagaaccaaatagtttttgtcgttatcgcgcattagttgtacaatatcatttgacccaccatttgcgacagatatgtcactatcattggagctaaacaattcctttaatgtatctaatttgacgtagataagaacagccagaagaattacggccaaaatcattaaatcggtagaattcatttttttgacttagtgacaacaaaacatagatgtgtgcctttgtgtttatataaaacagattaagatacggatacctgaatatatatgtatatatatatatcttaaagaagaaaaaaaataaaaaggttttttttaacagttttataaactatctctactgttgttgttcttgtggttcttcttttttccgcaagaatcaaagtgaatggcttaaaaatttcaagtcagcagagaaaaatgcaaaagaaagaggaaaaaagtgtaaaaagactgggaagttctattaattgacagctaaaaggttggttaaaggttcatttagatttatatcaaaattgaaattgagaaagatacttgccaatgacaaacgttaataataaaaggtgtcttacttttcgtttaaaaatagaaaaatagaagaagtgggaattctcttctaattgaatgaagttcacaagtgccagttttactccgactctaatggtcttttctccagaataataatgcatttaaatttttcttgaaaaaaaaaaaaaataagcagattgtttgtttttttcaaatttcgtggttttatgttctttatcttcttgacaaaataatatctttaattattcgtttaagaaaataaaccagtttggtctctcgaagagaaaaatacaagagaacgggaacgaaaggtctattgtgttctattgtttttttcccttgttgtgtttcctttgaaatagaatttaaaaagtacaaaagaaaaaagaaataaaacaagttttttttctgtcgcgtcatgccagaaatctctacacccctaagattttgaatcaaaagggttttttatttttttttcttttatagaactgaaccctttttttttttaattttcctattttcttatttccttattttgtgttgagaaaagccctctttttttgtccagtgcagctgtgtggttcaacatttatttttacaagttgattgaagagtttccccttggattaatcattgattaggagctgctttatctcgatggctgttttcaagaaacattttttggaaaacagatctaatgtagatcggtagaagtaaagagaagaaaagaaaggaaaagaaaggaaaagaaaggaaaggaaaggaaaggaaaggaaaggaaaggaaacttggtatacgtatttcttgcaatgtaacttcgtgcttttccaatagaattattgttaggttctaatatttacggtgagcttcaatttttaatctttattccagcatatgtaggggtaattcttttgtaaacagaataaaaccttagaaagttaactctagacatccgatttacgaaaattgaaaaagataatagtgataataataaaaacaaaacaaaacaaaaacttgcaacaaaaagaaggaaaaaaaaaaataaatttcttcttgatgtaaagaacactgtgtctcacagaatagaggcttcgctgatctctcgttttttgtatgtattttcaagaaaataaaaaagagaaattccaacttattttatgaaaacgctagcattaacattctatatatatatatacattgtaagcatttttaagagaatctgtcatttttgtcagccacaatccttcctttttttaccccccctccctttttttttattattttttgtcctgctgaagtttcaaagttagcattatcgtacaatggcgtcattaactattatctaatgacagaacagtatactttatgtataaagataaaaacactttctaaatcatgaaatccattttcaacaatgtgttacaagaagatttcataaaccaaaaatcatctaagaaaattacaaaatatcagtctaaaaaccatagatttattagaataatcccgcaaaaggattctgaaaaattgatcaatctaaatagagaacacccaaatcaagttgattttgctacttataaaaaaggtctgcctcaaatatatctgcaattagtgttgtttaaagacaaaaagcagtatcgtccaagggatgtacttagcatgttggctcgcttcaattctgatccatgcagattctattgtcaatattattcggagaaagataataaatattgttcataccattatgagacaaaatcgtcgagagaaagtcttggtgtcacacgaaaaaatgttagatatcattttgtcggatttcacaaaataaatgacttttcaacagagaatcttctaaactatataaatctttttcaaagaaaggagttattaaaagtagctgaagattataacaaagagaatcgcctagttattagttaacaacagtttaaataaaaaaacgattacccatttaaaagattttcttttacattttgttgttttcttttttgtttaaaaaaaaaaaaaggaaaaaagaaaagaaaaaaaactttgtgaataggaatatactaggtgggacatcatacacatgcaattgaacctaattctataacgaacttgggaagagggggataatgaaactcattaaaaggaatgaagcacctgaacagggggacaaatatttcaatttttagaaagttacacttttaacaaatagtttagatagagtcctatgtagattcatatttttcaaataaatcaaaatgtctgataaagaaagcctttatttgttcaaaaactttcatcattagtgattgttgattttttgtttttgtttttattatttttagaagaatattgtaatagatccttttattggattctaaaatcatacgcgtcccctatagttaatttaatatcatccattaatgagggtgcttgttgagaatctaaaccagtaatttccctgaccattgccgttaaattttccaacgtgaattctgcttgtgttcttctgccgatacgataaagtatactctcttcttcgagatctgatttttcttctaactttactatatactctcttttttctagcatcttcaaaaattcatctatggtccaatttaatatagggatcctggtgccatcagttggaactccaaaagtattcaatctattcattaattcttgatgtaaaatattattctttgaaaaaaggataatggtcaatgtaacacctattaatccatgcattaccgtatcttgattaacgctcaatttattctctaatgtattattacttggtaatgacatatcattccccatatattcttcatcgataatagtttcatcataaatacgaatgttttgtaacaatttaaattcattaaaagtgggtgcatgaggtaatttattcaataaaataaaatggtctgctttatatcctgttttgtcctcagtggatccatttgatttattatttttttgaaaatttggctttggtggcaatgcgtgtaatgtgtacccgaagatatccattaaaataaaattaatgacttcatatacttgtttgaaagtgtatctaggacaattctctttacgtgacacttctttgatcacattttgtaatctagtttttgtaatgacgttgttagatgattctgcttgcgataataagaaacgaactgcagaacgtgccacaatgacaagtttagagttcccataaatatcaactgtaggcgtctctggttgaaaggatacttctgtatctgacatgttctctgtttgcatatatgtatatataggctgaatcaaaataatttatctgtggaattatctacacatatatgtgcgtgaatatatggatgattctgttcgctatgtatcttaacatattgcatacttgttaatgaacttatgtaactgttgggtgtgcgtttttgaaattgttttttttgttgtgattatttaaaaacaaatacttatacgtgtcactatttcttttttacaagaagtttgaaacttttttttatttttttgttgaaatagaaagagataattaaaaaatatcaataaactacagtaggccacattacaaagaagggaagaaaaaaagaaataaatagtgagaaaagatagctaaataattgcactttaataattgtatctgcttttcgtaaataatcattcagaatactgtagttttccatcaacttggtcccagaaatctttagtaaacttatcttgttcatttttaccacatcctccacgaatagccaaatagcaacgtccattaataggaacatcccattcaccaggattaccaccgacaattctcccaccagtttcctctagtatacaccaacctgcacagacatcccatgcccaacatccaccttcccagtatgcgtcaagaacaccaatggccgtatggcatatattcattgctgcacttccaaaggatctatatccgtggataaaaccaccatcttcacttaacagatttttgtaagtggtcattttcttgttaaagttactatcaggttccgtacttctttcggaccctgcttcaagacctattaacgatttttgtaatgttaaacgtctgcttgtagcattgatcctttggttattcaaaaaggcaccattccctcttgatgcatgaaataattgatttaaatgtggattgtaaaccacaccaacaacagggtgaccgtcgatagctagtcctaaagagcaacaactataaggaaaaccatggataaaatttgtagtaccatcaattggatctaaaataaatgtaggattatttgagattttagttttacctgggatatattcctcttctccaatgaaattaaatttatcaccaaatttgtccttgattgtgtcttttataattgcctccacttgtttatcgtattttgtaactaaatctactgcattggtcttatcaatatattgttgggatgtgatccctgtttcagatttgattattggaccgaccttatcccttaacaaatttacaacaaaaatttcgatttcttttaattcattattagtaaatgacattactaatgcttttttgattgttagtcaaaaagatgttttataataatatgtgaaatggataccgttggaatggttgatatcttggtttgattataactgttaatattaaatattccctttcaacttgttgagtatggggggaaatccaaaaccctttttatttttttttattctcattaaaaaacgattatttctaaaggattagttattccacttaaaatatagaagaatgggccagaattgtttttttaatgaaccatatcttttgtcatgggctcttaaaatggtaagtaagtaaaatttatatctatatactaaagagattataacagattcactaattaccgcttacaggtgtgtttaggactttacatatattgggaaaaaatgctaaagtctattttaaagatatatcctttaaggcgacaattttgtagctcgaatattttatggaatgggaactattctcatctaaaacttaccttttttgggaaaccaagttgtgggttatgtgataatgctaaggaagtcattgatgatgttttaaacgaaaatgaagagttttctaaagcaggaatagctatgaaaataattaatatcaataaatataagcattggtgggatagatattgttttgatattccagttttacatatcgaaaatgacaatgaacccaattcattgattaagataatgcatttttttaaagaagacgaactaatcgaaacattaaaacattttaaaaggtaaaattgatgttagtttcgaaacgaaaaaaagcaaaagattatatctgtagcaatttaaatttatatgtatatatttattttcaaaatgtatcaacaaatctctgtctatgtctgtgtttttagttatgttgttattttttgattcttttatttaaatttgtttttttagatattggttcttccaaatcaaaatcatctactaacaacaactttttcttgttttcctttctgctggtcatttttatctttggattcaacggctttacatataatagcgaagagtttgttagttcaagatcatcagttgaagaaaacgatagttcaaattcatcatccatcgattttttctttccattaatttcaaaagcatgatttttttcaatcttattacgtgatgtttttttcctttgattattaattttattttgttgtagtatgttctttttaatgggatctttaagaatctgtgtttgaagaaatatagaattacttctttccttatgatattgggtatcattagtttttgaattattctcttttgcattaacatctttcttgtaattattttgctccaaatttttcattttatccttgaaccatgtaacttctgcttttaattgttttataattgagtgacattcttcgtttttgtcttgtaaacacaatttttcagcaatgaactcttgtctttctgtgttatatgaagctatattttgtctcaagaattttatttcacttatgttttcttgaaaagattctttattagactctattgattttcttaaatttctattttcttcttctaattcgagttcatgtgcctttagttgaatagtctctacatttaatttttgaaattgatcattgattttttgaaatttctctaacttgctttcctgctcttgttcccatgtagttttataactttgaagttcttgtaatctttgcttcaatgtctcattttcagaaataattgcactgtttatttcattttgtgaggcaagtttattatcaaagtttgctttttcagtattaagcaagttttgataatatgagagttcttgttcacatttttctagtttaatattattttggtttactagtatcatcaacttttcttcctcttgtttataagtaacaagttttgaattttgttctgtatatgtactagaattttcttcaagttgtgcatctttaatgcctataaggctcatgttttcatttatttgttgttttagagagcatatttccatttctaaatcttttattgtttgttcatattcttttgataaaattagtttttcttgatattctccaaactgggtacacatttgttgtatttgatcagagaaaatttgattgttttttgttatctctaaaaaagaattattgaaactgttaattgacgtttcattccctttcaaaatttcatgtaataatgccttctttgcaaaattgatattttctataattatctgtttaagagagctggaagtatcagagatacttctagactcttgtatggaatttgcctctattttattcaaagatttcaatattatattatattcctctcctaatctaagtttaatcattagtaaaaaaaaattcagaaaaaaattcagatttgttagtatattttatgttttgttttaaatttttttttaatgtacaatttttttacatacctttcaaacaacgttccgtcattatcttctatcgtagttaaaattttttcaaattctgtttttgagttatttttaagatcattatttaaattatcaaaaaattctttgttatttgtcatattttttttcaagaaatcatcccatgaaagttcggttagctgtttgatttctccaacaatttcatttttaaatgttcctaattcatgtgtgagggacccattttttattttctcttcacttaattgcccagaacaatcatccaattccctttttaaatactctatttcttttgctctctttgttgattctatttctatatctcttttactgtcttgtattttgtttagtagtgttttcaacaaaataatgtcatctctataaccgttaactatttttttagatgtttcatattctttctttaaatttcggatttttccattatctgtttctttctgtgaaagcaacttccgacttttgttctctaactctgccaattgttttttaaaactttcaatcttgatattaactttatttatgtcattttcacaagaatttaatttaatcttcattttactattctcactttgtttcaatattaattcttgtttcaaattggagcaaatccgttgtgtattagtgaaggcttctaataaaacatcatttgaagaggaatttgatatatcaatcattgttgaagaggttatttctttgttggatcttgttggtgttacagtttttgcgataagttggttattattattagtcagagcagcagtattatcattaatatttggtaaagaaattttgtctttctgatcatctatttctctcacctcagtgatttcaaaatcatcatcatcatttatgggttctgtatttatttgattcttagcattactcatttttattgaattaacattgtttaaagaataatttgtattattttgattattatttataggagtgctggaaaaaaatactttttggcttggacctagaacaatggattcatctgatgtctgttgtgtcgtttgatcactatcaccatgtgtgtttgttagtccagaatttgaattgttctttgatatcaacatcagagtattagtaatagaagtatctgcttcatcatcaatgaaggataagtgtccattgtcctcatttaaagaaatatttgtttggttggattttgtattagttaagcttgtttccttatttttaaacttgctaaaaatattggatcttgatttgaatcctaaagatgagtctctaaagaaattagacattcttatagttgtcactctatcaatctttattttttgttgctcggaactacttttaaaagaagtatggaatttaaccgctgaagtctgtgagaatataagtgtcggtaataacagcaaaaaaaaaaagataaaatcaaaggtaacaacaactaagctatatctactgttttttcattaatataattgtgaaaagataaattgaaggaaaggggattagttataaattatattaaaagtgttttatattactcattggcacataaaatgaaagtacttgatatgtcttttaattgtttgattgcaaatctttggcactaatataaaacccatacatctaactatttgaaactttctaaggctaattaaaaacatatagggtttgatcttttctaaacttattttttccatttattttaattaataccttagggtatattgaaaaacatttgctgtatctttaaaccctaggttttagaaaatacacaagcctctctcgagtaaatataaataaaaatattttagcttattttttcaaaagtaaatagctaaaaaaaaaaacaatttagattattaggcaatttgtgcatagatactgcgatttcatacagcgtatatgtatacaatagttgttgatcttcagttataaagagagacgatcttttcaggattatatcctagttataaataattcatatttgaaaaaaaagaagaaatctgaagaagcagtagttggtgatctgattagttcaagggtgagtactgtaagggctgagtgtattatacaaattgtatttgaaaattcttttaattttacttgagtcaacaagaagtttagaatcttattattatttctttttttttgtattctccttttattttatttgaagtgtttttggaaacccttgagaatctgcacacaaatagacaattaaattatattgaagtgtaaatgactattgatcgtttttccttgggtggtagtaccaccagctttgcttatagactacctaaatggagaattccagatactattcttttagccgttattatgttgataaatataccggtttatttccagccaccatttcaaagacaatttatacttaatgatcccactctaagtcacccatatgagttgaatgaacgtgttacagactttatgttagtaatatatagtttggtgttaccatgtgttgttatactggtagtttggtatcttttggtagatagaagacataagtggaatgtactctatgtatccttattaggtttatttctttcatggttttccaccgcattatttacaaactttattaagaattggtttggtagaccaagacccgatttcattgatcgttgtcaaccaagaccaaatatgccaattaatacattgtttacagcagacgaagtttgtacaaatgaaaatgaggctattttattggaaggttttagaagtacaccatcaggtcactcaagtgagagttttgcagggttaggttatttatatttttggttatgtggacaactgatgacagagcatagtcaagttgggatatggagaaaatatgttgcaatgattcctcttttaattgcctcattaatcgcattgtccagaacacaagattataggcatcattttgtagatatttttttaggctccgttattgggtttttcatctcttatgggatatatagaaaatattacccatcaatttcaagtcaagttcccttcaaaccattgttggatgattctgatgttacatttgatgtaccatctgattctactattatggcaccttctacatatcaaagaagaattccattgccacaagatgaggagatggaacctctatctgcatgatcctcattttactattaatattagctatacatatttctctatttgtaggcagaaatatatatgtatatcttagaggcatagatattttacttcttctattttaaaactagtcagatacaagtagtaaaatctgtccttacgttattttataaagtaatctttctgtgacattatgtttataatttttatttcttttctttttttttctgtaatcactaaaaatcaataattaaaacaacgtaatcaaaaactaaaagagtttaatagttcagtttatataaagatgatttatgaaaaaaaaaataaattctctttatataacaacctcaacgatatcaaaaaaaatcgtatacatgctgttactttaaagtattatttattagaaatcggattaagcatagctaaactacaaaaagataaaaaataaaaaaaaaaggtctaaaggataaggaaaagcattaaaaaaactttgattgatttaagttctttttattacattaaaaatattgattattagtatatatcatcgtcatatacatcatcaacttattatagagtttcttcttcttcaatcaatatttttttctcacatatgaatagcaaatgtcgctaagcaacctctcattggatcaatattatgagatacagaataatgaattagaagcaattcagtccatttatatggacgattttgtggatttaactagaaagaagtctagttgggataagcaaccacaaattatttttgaagttcatgtgcgatcacttgaaaaggaacccgctgaatcttcgttaacattacacattgctatgacaccaatgtatccccatactgcacctgaaattacttttaaaaatgtagaaaacgttttggattcacaattaaaatatctgaaagatgaatataagaaaattcacaaagaagcaaggggacaggaatatatttttgatattgttacattaacacaggaaaaacttgatgattttcatgataatataaatacaagatcgttagaggatgatagattggaaagaattaaggaaacaaatgaacaaatggtaagagaagaaatggaaagtcaacaacaaatcgaaagattaaaaatatccgaacagcgtaaaattgatgagattgtggaaaaagaaattgcaaagagacaaggtgatgatgacatgttgtttaatccaattaatcaaattaatatgcttccaccagaagaatagattatctctggggaggctgtggtatttcctaaagttattaaggctaaaataccgaataactcattgttaaaatttaaagctgtggtgaatccaaaacccattaaattacaatcagatattctttgttttgctaaacattaccttgtaaaaccatatatatcgccagattctccattggcagactcattgatgtcttctgaatttatggaagatttctattttttattaatagaaatcgaactggacaatgcatattttaatacaactaatggtaaaaaagagatcgcaaatttggaaaagatattagattcattattgaaagttaaacatgataatgtaaatagattatatggctatacagtggaaaggactggaagaaataataatacatttgtttggaagataaaattattgacagaatatattaaaggttatcctattggtgatatgatacagtcagttggatttgttaatttagcaactgctcgtgtttggattattaggatgttggaagggttagaagctttacacagagtcggtatatatcataagtatatatcggtacaaaccattcaattggttaaggactctgattttggatcaacggtacctaaactgatgcatcctgcatatggttatacacttttacaaatgttatttaggtatcctaacaaacaaagctcgacagtatcctttccggtcttgtcttggtgtcctccagaactggaaaagatgaagaaccccaaacctcaaagaactactgatatctgggagatgggtgtattgtttattcaaattattagtggagttgatactgtgttaaatttttcatcacccgaggaattctttgaaaataatgaaatggaagaaagtttactagatttcctggagaaaatgttaaatagtgatccaaggagaaggttggatactcttcagttgttacctatgaaatttttaagaactaatatagatcttgatataaatagatttaacttaaaacttgagagatcaacaacagatttgcccacatttcagatatctaaaaatgatactagaagattatcacattcaagtactggaagaagatcatttaacattggctctagattttccttgacaaatactgcttctaaatcaagatatgctacagattttgaagaaattgctgtactaggtaaaggtgcatatggacaagtagtaaaagcacgtaatactttggatagtagatactatgctattaaaaaaataaggcacactgaagagaagttgtctagtattttgggtgaagttatgcttttagctagtttaaatcatcaatatgtggtaagatattatgcagcatggttagaagaagattttttagatgaaaatgctattgattcatcagatgacgaaagcgaaagttcaatcattagtgatgataggagtgaaaataatgaggatttatttaacaagtctagtttggtgtatagcagaactacagattttgataatagtaactgggattttatctcaaattctggttatccagatattgtgtttgctaatagttctcatagtaacgaaaatgtagttttagaatcgtctgatatatttattcgtggtggggagtctgctgaagaagatagcacagattctgatgattctgagagtagtgatattaattcaattgagccacattcaaagaacgatttcaaacaagacaaatctgtgacaaacagaataaaaaagaaaagtactttatttattcagatggaatattgtgaaaatagaacattatacgatttaattcatattgaaaatttaaataaggaaagagatgagtattggagattatttcgtcagatattagaggcattaagttatattcattctcaagatattattcatagggatcttaaacctatgaatattttcattgatgagtcaagaaatattaagattggtgattttgggttagcaaaaaatgttcaaaggtctattgatatatcaaaactggactcttcgaatgtatctggaagtgttgataatttaacatctgcaattggtacagcaatgtatgtcgcagtagaggtcttaaatgggaaaggaaattataatgagaaaattgatatgtactctcttggtattatattttttgaaatgatttatcccttcagcacaggtatggaaagagtaaatattctcaagggtcttcgatcatctagcgttgagtttccaaaggattttgatgttaataatttaagaattgaaaagaaaattattagtctgttattggatcatgaccctaacaaaagaccaggtgcaaaggcattactgaatagtgggtggttacctgtaaagcatcaagatgaggttataaaggaagctttaaaaagtttggcagatccctcatcaccatggcaacaagaagttagaacaagtttattttcccaatcctatagtctaactaatgatattttatttgacaacaaacaaattgtaacaaccccatttgctcaaatactgagatttcaaatgacgcaagaagtaataaggatttttaaagaacatggtgggattgaaaataatgaaccaccacgtatttttcctaaagcagccatttatggtaatcaaaatgtttatgaagttcttgaccatggaggtactgttcttcaactacaatatgatctcacatatcctatggcaagatatttatcaaaacatcctaattgtgtttcaaagcagtttaggttacaatttgtgtatcgtcctcctgatcaattaaagtcaagccttgaaccaagaaaatttggggagattgattttgatattatttcagcttcttcatctcaatcatcattttatgatgcagaaagtattaaaattattgatgagatattaactgcatttcctgtgtttgaaaaaactaataccttatttgttattaatcattcagatatactagatgcagtctttgattttagtaatattgacaaagctcaaagatcaattatatccaaaatgttatcccaaattggatttggtaagactttcaaggaggtgaaaaatgaattgaagtcgcaattaaacattacttctacagcattaaatgatttagaattgttggattttagactagattttgagacagcaaaaaaaagattgcataagattatggtggatagtcgtcatttgaaaaaagtggatgattccttgaattatgtttctaaggttctttcttttttaaagcctcttgaagtttctagaaatattgttctttctcctttgagtaattataatagtgcattttataaaggtggaataatgtttcaagcagtttatgatgatggttcaaataggaacttaattgccgctggtggaagatacgataatttgatttcgtattttgcaagaccgtctgctgtacagaactctggtagaaaaagagcagttggttttaatctagcatgggagacgatctttggtgtagctcaaagttattttaaattggctgggggaaatagagtcaaaaagagaaataaattcttaaaatcaacggcaattgattggaaaccaagtagatgtgatgttttaatatcaagtttttctaattcaattttagatacaattggtgtttcaatattaaatcagctatggaaaaaagatattagagctgatttattacacaactcatacacagtggatgacgttgtttcttcagctcaacaggacggtattgagtggataattttgattaaacaacaatcgtataatgtttcttcacataaaaggaaatataagccactaaaggttaaaaagttgagtaacaatttggatatagatttagatgttgaagaatttttacaattatatcaacacgaaaataatattgacaagggattgggagaagatacattgttgcttggtgataaacatgaagattataattattgggatgaaggtagtagtgcaagtagtagccaagatggagataaacataatgatgaaatacattcaactagtcaaaaggtggtttatgtaccaaatctagctaacaggtcgaaaaaggctaataaaagagaaaaatgggtttatgaagatgcagcaagaaaggcctcaaatgtgattgtgaatagtctatctaccgctcctatcattacaatagacgctttaagagatgaaactatggagattatggcaataacatcgttggctcaaaaagacgaatggttgaggaaagtatttggttcagcaaataattctacgcctagaagttttgcaactagtatttataacagtttgtcgaaggaagcttccaggggtaatagatgggcaattcttcatagtcataagacaggtcattcggttattattgatttacaaaggtgatagtattctttctaatgtttagttttttaatatatgtgtactatatagagaagtatattttaatgtataccaacagctaaattgttattcaacttgtatttaggttaaaaaacagtatagatattcctgaattgataatatcgtcattgctttaaaaaaaataacggtacatacttaaaataattgtaatttgtatttattaggtaattgtttttaactctataattctttatttttttaaaatctgtggaatatggttttcaaaactttcaagatataaatattttagcatcatttttattgatagaatacaacattaatgataatggatgctttgtaggatggtgcacgaaaaataacaggagctataaaacgccaaaagatttaaacatgaataccgttaaaatgtgcgacaggtaagaaatgaaaaggaaacaataattggatttaaaatattaaggatgaataggaacttctagaggagacaaaaatagtccttttttaaaaagtgtccatatatcgttaataataattttttattttattatcttcataaaaaatatattaaagcaactgtaacaatttttattatatacaaaattcctaggttaacaagtacgcctttccagcatttttagtaatattttattgttgaaattagattagaaatgtatgtgataatctaaatttttcgtaccaaattacagaagattttataatagcttataaaagaagagttaaaataatatgtaatatagtgtataatagttatatatttatattaagtatgtagaacaaaagaggatgagcaatacaataacagtttatagtactactaacttcctattataaatagtcgagaacttataataccaccaatattctattatgggttatattatctaattatattgatttaaaataaacactaatagaatttctatttccaaaatcttatctcaatattcatgttcatattatttatagtttttgattaataatttttgtgttaagaaaaaaatttttgttattttacataatttgtttatttcaaaaagtacaagtttacattttcgtgctattttaatgaattcatcaataaaacttccacgataactgaaactttaaaaaataaaaaataatactatatacattaaatctctacaagaacaggacaaacaacaaatgcatcaacgctgaccataaaaacaatatttcttaaccacgatgaaactttcgttaaatcataaaaagggagccaataagcataatcaatttgtatccttctgaaaaatatttcatgctttctcaaattattccgggtttagtaaatcgaaacaccaggccaaattaaacaattatattttaagtatttttctaataaattcaacctcaacataaataaacaagaaatcgagatacttttaagtcaaaaacttgttcttttttgaatactaacaaactttcccatgaaatcatctaaaacatcaatacttttctttcaaatcatattcgaactattaaagcgaaatatctccttcaaaatgaaaatatttttgtcctttgaatatttttttgtctaagtttatttgaaaaaaaagaagcttttaaatatatattaagcaatttaaccgcccatataaaaaaaatcaaactacagaaacaaagaaaaaactaacactttttgtaaaacagttaaaaaacaaccatcaaatccattggaatagttagtcagctacaaacaatcgtgaacaatatggttaaaagtaaaattgatactaaagccaaaaattggttacaaccccaataccataacctggaagaatgtaacaagtgcagcaccaaagaacaaaaaggtcaatactctgaaaatatagaacagaactcaaaagagttaacaaagaatcccaaagtaaaaagctttaacggaaaacataataaggcaacaaaaaatgatattaatagtttaaaagataaaaacgaaatcattacatcaagacaacattcaaaaaaaggtcaaaaaacgttaaaaaacaacattagtgcagttcctagagactacattttgcttgaaaacaaaggtactgttgtaactaaagtatcagaaaaatctttaaagaaaaaaacaagactgtccatcgataacaacaaactagaagataaaaataaaagtattatctctgaattatctcaagaaagaaaaaaacacaacaaagataataataaaaaaatgatagaattaaattatgatgttggagaaaataaaattttcaatgaatttattttagttttaaaagagaatcaacaatttattaacacagaacagcataacactaaaaaacgtttcttaaccatcatgaaagattatattgatactaaaaatagattacctttagtaggaaccagtcaacaaacaggaaaggaaaaaaatttaagggagcataaaaaaattgtagattttaattctactattgatattagagaatttcgtggaagttctccagtatcacacacaaaaataaaagaactacacaaaaagcaaaaatttgaaaaccatcaaaataccaaataattaaacatcttatctaaatagaacagaaaatttcaaatcaaaagaagttataatacagccgtaatgaaagctttaatggacaagatatcgaaaagtactaactaaaatactaatgaaaaaacatgttacaaacatttttgagaatactcaagtccatatatattagctaaccaattttttattgtatatgataaaaaactgtttatctaataacttaagcaaactcctcagattctcattgacgaactatgtcaagttttcattgcttttttctgaatatccagaaatgtcattacactaaaagaattaaaattaaaaaaaaaaaacaaaaaagaatcaattttaaaaaagcgaaaaaagattataataagaaataacagagcttctactattgaaaaaaccgaaagccaatcgcaactattccaatcaacaaaatcaatcactaagtattaaccccattattacacatgagtgaaaaaactcagcaaattttcgcagaaaagggcccctataggaattatttaccttcaaatatatatgctaagtctaatgttgggagattaaatctcctagaccctttaattggagttacaatttctattggctacttcatttacatggttgggcaaattgattacatatttaacaatgaagaagtagaaattttagatttagttctgttaaataagcaaaaaaaattttatctaggaactaatcccccatttgttgtggagctatttagttttcttttgaattatttcaaaatggttcaattaaaacattgtatgctaataacagcatgtttatcattgttagtaatatacatgattctaagaagaaataatgtctcagtgatactttcaataatcagtgtatgtaccatttgctatctacctcattttagatcacagtccataattttatccgttaatgttgtgtattggttgtcctttcttggtacaatctacttctggagactctatagaattcaacgtggctcaacactaatgaatttagctcatattggcatgttcttaggagtagccatatccacaaaagtattaggttttgtcacatggctttggattatttgctgttccctatatgacacttggaatactcttaatgacatcagcattagtttgttttcaattttaaagaaaattactttgaaatttgtattcattattctaattcctttacaaatatttttattaataaattatcaccagattactgacttcaaaatagattcaccagaatattccagatatgtatctccatatttccaatcgtatcttcgtaacggtacattgcataccagtaaagatcactatctttattttggtgatactataaccttaaggcatacagcttccttgggaggttacttgacttcctataatatttcatcagatgggagcgctgaaaacgatgataatcaaaatcttgtcacattatcacctcatgaagaaagtgaatggactcattggattgtcgaaaatacatcaactgactctccttttaaaagagtgcgtaaatttgataatgttaagttaagacataagattactggcaaattattaagggcatctgattcctctccacctgtcagtgaacaagaatatgacaaattagtttgtactactggagatattgattacgagggtaaggctgatgagaaatggattcttgaaacagtggaatattccatctcaaaatatgctaatgaagagatatttaatgttactagtgataaagtacaattatctaatcaaggcagacattgcactctactaggacatgatatcaggttaccagaatggggatttcatgatcaagaagtgttatgcttagatcctgcaatggacaatttggctgaatttcaaataaaagttattaaatccgaatccaattctatggtagactaccatattaattcattcaacaaatttaagttaatttttgagtggctagttagacaatacagatattcctattccatcaagaatgctgatccaaggaaaattgtcaattcaaatataaagccctcaattgaaacgtggccattcgatccacaacaaaatgaaattgtagttaagaatatttggattctttcctttattggtattatgctatttggtttattcacaacattccgtattttaacatggaatccatggaaccaacaacctacagaaagaaaaattattttggtagataacttattattccaagatattggatttgaatgttgcttgggctggtttttacatttctatgtgtacactaaaagtccatctcgtaatacatcagcaattattaactatttcccaagttatattttaggatttattgtctttattcagacacttaacactattaataagagatttccttggactaaaatgttaattccattatatgttgctgtgttatacaaattggtcaactaaaaaaagatacaataaatactccattcgagtaactaactatatatatacctacgtacatgaacataccgtcaaaaaaaaacttgtctaagcacatcccatcaacatatttacgtttaatataatttttctctttaaaacattccttgtcatatacttacttcattgctatcctttgaaagctcctgttctgtctttatctcattatgtgtaggttctggtttgattctggttttctcagttttattttcaacagatccttgattgcaatcataattattaccataaccactagattgtgcagcctccgtaagtcctgaaacaaacgttgttattaaaccatcaacctcatttaaaagtgattcttttttccttatagcctcaattttctttttttcaacttcaatcaaactcttctgtaaagaatcaattttatgtaattgttcatcagcagaaacatctacacccggtaaagaatcgatcaacttaataatctgtcttgttttcaatatgatatccgttgataattcatctatagtatttgtaaattcttcacttggagcaactgtggcatgtttatctgtcatcttcgtctcaaattcattagcaggttcgaaatcatgattcttatcgatatagttcaaggtagcacaaaattgttccattacctggtccaaacatatttgtaattgggttaatctatctgtcataatgatgataataataactgtaataatagtaatagtgattgacagcttgcaatacagtattgggtttattcaccaatccttgctattagcttctaaagaccttcttccaaccatatatgcttaatattatacacttacatgttcttcatacatataggtgtataatacatacatgtacatgaggtttttctatttggattgggatttctattaagaagacttctaaaattcaatcaaagaaaatcgtagctttgttagggtttataaatattctgtttaatacaggatgactacgttcttattttatatagggttacaaattattttaccaaaaaaggacttcattttccaaactcaaaaatcacaactaaatacagttgaatttaatgtgttaactcaaaggtttcaaaatttcctaccatcaaatccctttaataaaggtaagagattccatctgacactattcagtgaactctccctcctcttgatattaaccatcttactttttataaccttaacttaaatgttgctttggagtgaatgcctgtaaacttttatttaaataaagatacctaatcatatcttgtcaaataatagggcgatatatctcacaaacgtatatacacacactcaaacatattcagttttaagttatgagtcacgaagaagcgaagcatattccttcaaggagaacacccattggattaaaagggatcgatactatcacgattaatgctgctagagaaatgcatacaaagacagtgagggcccgtttcccacctaacagaattcctaaccctgctacgactacaactacaactaaaactaacaccaatataaaagtgggtatggacagtatcatgtggaatgatatttttagtgctaaaaacagtacattagttacaaatacagcaactgacagcagaactatggcagaaacagttactgcaatggcaccaccaatgatggcccctgcaaagttaacaaagttgcgtcataagtgtaataatccaaataatccaccttgcttacattgtggaactatgataattccatcacctactgcaagaatgcccttagaagatataccctctatttcgattgacaattggactatcacttcttgtaaaaaacctattttaaactctgttgaactagaaacatgggaatctaaatatttgcctggattaagagcattacctgagatgatctttggaaacaattttattaagattgaaaatataaaacatagctggcaaatcgaatttaatgccttagatgcattgaaattagtgtcgttagaagatgcaggcatccgtgttgcctattccaaagattggatcgagtctaagaaacgtgtaaatcaaaacaaaaatataaataagaagaataatgaaattgaagtccacgaagttgaaattgataaacttttacaaatagtgaaacattacgattggacctatactactgagtataaagggacgatacatacaaaggaaaaatcaggggaagatgataaatatatcttccagagagatgattctttagaattaccaatagagaaattgtcacgcccggacccaattttatattttgatgatatgatattatatgaagacgaattggcagataatggcatatctttactgacgtgcaagataagagtgatgaatgaaagattattactattaatgagattctttcttaatgttgatgacgtgatactaagagtctacgatacgagagtttatgtagaatttaacacaaatgaaataatcagagagtttaagaaatatgaaggtgataacgagacactccaaagatatagtaggatagccaattcaatggatcctaaagcgttattaagagacagtgattgggttgtcaaacatttaccactaaaaactagagaatgtgaatatcttaaatttagtgattaacttatcgtattaatacacattcacacacacacacacacacatatatatatatatatacatatatattaatgatcatttagagagaatataaccagaaataaatctatcataatcattggactcatttccaatctcctttaattttttattagctagtttaatcaatctagtcttatcttcatccttcaatctttcacatattaatttaatcaaagtccaaccttttaagaaagtctcactcaattctactgaccttaaagcattattaagtgctgacttcaggacctctactttatctttatgatttattttagtgctcattgaatagtaaacatacatttcggccaatttggcaaaggcaatatagttaaatggcataatcaatacaacttcttgcaaacaatgaattgcataatcaaaatgtctatttaattcatatattttagccaaaaaccaccataattctgggtccaatggacttttctcaattaaaatattaatttcttttatccatgtatcccaatactttttagtttgtttattttcagtattgttattaatatcattattaacatcattgttattgtagtctttaccataatataatttcaaagttaacaattttttagataatactgtatagcttgccatatctgtgtcatattcatattcttgacgtattaaatcgtccagatatttaattgcctcctcaatagaaccattaaattgcagaagtgtggctttcataacctgtaatttacatgattcttcacctaaagtatcactaatctgattataaataacttgagcttctacgtcttcactacaaaatattgataaataaaataacatctccattaatgacaacctttgttctggagtcagttgagtatctccatgtttcaaatatctcttagtctcattatacaactgcactgtctctcttggatcaaattccacataagttctagtgttattaatagttaaaagtctttgtctaacagcagtcaatgacattgttatcagttgcttatatcaacgatatctatgactttcttgagttaacttgatctgtttggtttattgggtacacaaacacagacaaactactaaccaaatactgactattgaaaccggtaaggttacttatgaatatctaatacaaccattcgtacctgtaacactttacatatatttgcataaagaattaaggttatcgatctgtgaatacttcattatggggatattctacattattaaacattctcgaagcgaaaatctacaaaatgcacaaaataaaaattacaccaaaacttagggtttaaagagatataaaacattttttggttttacataccaaaaaacattagggttaagaaataacaaatgctttttctaagtaaaaagcacacaatttcccaattaggaaattgatgatccttttttcttgtttcttctttcactcaaaaaaacataaaattttttttcttctattttaattaaaaaaaatacagttggcaaaaagaagaattgaaaagaaagagtggagtcaatagccattttcatgttcaggcattcgataaaactttcattgaaaccgttacttttgtgtaatgtagtttaaactctttttagcataatatttgaactaatacaaataaatttattttcagtaattctttgtaggaatcccattccacaaatcttcctagacctagtgattgtgttttagtcaataactactacaggaacagacaaacaggtaaatcaacaacaacaacaacagtagcaacaaaagaactagtagtaccagcagcaatgagtaaaagaggagctgctaatcaacttacaagagaaaactttaataataatagtgatgatgagtctaatggtccaaataataacatttttgcttcagctgaagtaatgaataagagaaaaattgctatgccaaaaagaaaaatgacattttctaataaatttaacaaccctgccttaaaagctgaaacatcctttgcaaatgctttcaaatcaacaacgacgtccacaacaacaaataccaacaacagtgatgataaaccagcaaaactaaaggcattgaatgagcagttcaaatcaaaaattcttgatgtactttcttctgatccatgttccaatttatcatctttattttccaaatatacccaatatttaaatgatattaataatgaaccaaccatcaagactaaagagccaatgactagcatcacttcctctttcggttctattccacaaaagcaatcagaggtaactaaaactactcagccaaaagtaccatcttctggatttactttcactttaagcaaacctgcccctgaaattaattctaccacaacaaagaatgatgaacctttaaataataaaaaagaatctccatctcctgcctcatcctcatcctcatccgatagcgaaaatgaagaaattaagattgagggtcctaaattcacaataaatacgaaacctattacagaagattctgtgttttcatttggtcctaaaaaggctaataccaagaatgatagcgattctgaagacgacattaaaatcaaaggtcctcaatttactttctctggtactattaaaagtgatgtatttaagttgaaaccaaaagaaaccgataaagaatcagagtcaaattcaactgataaagagaccaaaactgataaaggagaaactaaaccattttcattttcctttagtaacaaaacaacagatagtgaacaaaaatccgaagataaaaataaaccggtatttactgttggtcaaaacttaacatctgcaacatctacaacagctacaacagcaaccacagccactactactaattcaaccaacctagaaacatctagtaatgaggttaaagatggtagagacgaaacaaaagagaaaacttcaaaaccaagcttttcattttctataccaacaaagtctaaggaagataatataaatacacagaaagctactacagctttcaatttcttatccaaacaagatcaaaaattggaaaatgctgagacaacaaaagatgaagtaaaaaaaccatccttttcctttaactctattggatccacttcaagtactgcaccaaattcatccgcctcattcagtgcttttgattcaaaattaaacaacacaaccacaaaagaggatgaaatatctgcactaataagtactaagacagatgagaaaaagccttccttcacttttaatcaatcaatttcaactactaaaccaacgttttcctttggcactaatgataaaactaccgactctagcaaattatcttttacatttggccaatcttccactacttcttctacagaaaataaagaagatgaccaaaaaccatcctttacttttgatcaatcttcaatcacttcaaattcaaaaaatgatgcatctactgattcaaaaccttccttcacttttggtattccaacatctaaccaaaagtcagaaaccaaaccaactttcacttttggaaattcaactacttcttttaataccccaaccatcactactgaccaaaatacaaaaaataaaccaactttcactttcggtattaatagctcttctactccagctccatctttcaactttagtaaaacatccactggtttaacaaatcatgctactaccctatctggtggtttcaaatttaatctaccttttgagcaaaaaactacacctttcacaacacagcctactgaaaaaaaagaaacagataaaattgagtcaggtgctactgagcaaagcactgttgaaaaggaacaaggccagaatgatactaccaccgaacaagaatcttctactccaataaagcttcagaatggagaagaagatgaaataaatttattttcgcaaagagtcaaattgatgatttttaatactgagactaaatcgtatgactctcgtggtgttggagaaatgaagttgctgcaaaacaaagaagataaatcaaaggttagattattatgtagatctgatggtatgggtaatattttattgaatacgtcaattgtgaaatctttcaattatacaccattaactgaagataatgaaaatttggtgaagactcctaccgttggaactgatggtaaattaactacttatattgttaaattcaaacaaaaggcggatggacgttcatttatcaaatctattgaagatgcaaaaaagggtatgtaataatataatatataataatacaactacgtaaataatatgttaataaaatacaaaaaaaaacatattgtaacatattttaaagttagtgtttttgaagggtcctacatggatggtttctttcaatttcctattcatctttatattttataaatttcaacaaagcataagaatcagacatcttttgttttttaaatactgatattctcaaattcttcttcaattaattcaacaaatcttgttattgcccattctattcttctcttatccctgatataggccttctcatttgacttaccaaccaaaagcttcttatattttaaattcttagtgataaaccatttcaaacttttcaaaatgatagacttattttcaatattaataccttttccaatgaatgaaagtaaatattgatcagtgtattcaaaaaccttgttcccatctgcatccttctttttactcttctctgacttcttaccaattaataacatcaaaaagtacaacaaaacttcaataaataaaataccatcattagttaaacctcccattataggaacgtgtttaaaactatctaatttcaatattccttcggaaaataaataaccaaaaaactttccttgactagctatccttgctaatcttttctcctcgtcttcatccccactatccgcattgaaaaacatgccattttctgaatctgaatcagaggactcctcaaattttttaacagtatcccaaaataagaattggaatgcctttgataattgatggtgatgctcagctatttttgaagcaaccaacgcgtagtaagggttataaccattttgtccagcatctgtcagtaaacaatgtaacacaacttttggaacctccaataattgtctgtttttaagattcaacttctccaatttttcaaatgcatcgacataatcttgggccgacattatactaatgaaaatagcacgacgaacatcagtattcattctttgttctcttgcaatcatatcccaatcaggaatatcatccaataaatcatcttcgagagatataatttcctgtatttcttcagtgttcttactcttatcctttttattaacagaatcctcattatcatgttggtcaaatgcagaattcatattacccctccaggatgcaccaattaaccaccatttacctctttcattaacatttttaatatcatctaatgatacttgtagcggctctattgatacagttgatttaataattgaactaataatccttttcaaaggttggtgatctactgctaccactgatgcttttaatctattattttttaaatcagataatgtacttaataaatattgcaacctaggacttttcttgttcaaagtcttcacattatttaacaattcagataaaatatcttttaaagctgatggatcatcaccacgtatcaattgcccagatactgccacaattcttaacaatagttccgtagttaattcgttgggtgttgaaacaaaagttctaattatatcatatattaatctgcacgaaataaacccaaaattataacagtaagatagtaatgtaataatgttgttacactcctttgataaatttatagcatcatcagattttaaatttttcaattcttcaaatttcttagaatagtatgacaagaatgcttctactactctttgtataaaggatgcaccaatctctaaaccccttaatctaaacaaagaatacgctacagcagcataatttataatgaaactatctaataatctattgccttgatcaacagtatccaaaatttgttttgtaataacatcagtaacataatttcttgggtaattctcatataattcattcaatgcagtaataatcgcattaatattactatcggatagcttgttaaatgatgatttaactcttttattaatatctgaaataagagcagattcttcagttgaagtttctaattgctttttcctcaatgatggtggaatatatgtttcattagcatcaggggaagaataggttgctgcaatataaggattttcctttttagatttttgatcgcttttttttgatttattatcttccaattctcttaattgttcccattcttcatcatctaaatcatcttcatcaaagtcttcaaaatcactttcagaaagttcgtcatcagaagaaaatggattttcaatgatatcctcggattcaccctcggacacttcactatagctgtaactgtcacttccgctaatttctgagactttgtcattgtcctcattattattcttatcctttatcgcaaaatcaccgtattcatcatcatcctgcccatagttttcaaagaaattaagaccatccaataacccaccaatagcatcgaattcatctctagcgtgaatctttttctttttgcccttcaaattcaatttcttagcataatatttcatatccatttcatctctttcaatagcagctctttcagctggggtcaaagggtgaattacctcactgttatccttattatgtgatttctttttatcctttgatttagaaatggattctgtatctttatcctttttctttttggattctttaagcttttgtaacttcttcagtttagtcatagtttcttcaacagtcatatatacatcatcactatcgttaccctccctaccactatcatcctcacctccatcatcctcttcttccaagtctcgcaactgttcccattcttcttcatttaaatcattatcatcaaattcgtcaaaatcaccttcagataattcatcatcagaggaaaagagcaactccattttaccactatcttgtcccttcttattatctctttttgtaactttcgaatcactacttaaattatcatatttacgaatttctttatcatttttcaactgcttctgatcagaaataaatccgcctttttggcagacactcttttttgatctgtctactgttcctgtcttgtttcttctctgcttcttctctgctctttgttgtttccttctctcttttctgttcagttgtgtagaagcacctctcttctgaccatttttggatccattttgaaatctaacatcattagaatagtctctctctttcaattgatctaggatcacaccagggatattaataccttgccttcttgacatagttggccttactgtatatcaaattacgaacaatgaacaaaaaaatttagttccaaatagatacaagcaaattacaacaatactttctataacaacgaacagataaacgtacttagatgtttcttgatcgaacctagccgttcttttccaatcggctctaatttattcattaatttttctcactcatcctcttcagtcaattctttgctcatcgcagccttaccacaaaaaaaaaaagaacaataaaaatttttcacttaaataaattaaaagaaactaatgatgagaaaaacggtaactgtagtagtgggttaatcatttctcgaacacttttctaaacaaagagacaatttaactgtatataatacccgtattggagaaaataggtaacttgaataggtctgaagaggataatgatgtatatgtaagtcacgaacaactcagttgcacatagcatgagcacctgaaacagcatagtacaatgcctgagtctaccgtagataatagtaatactaataactccgctggaaccaaaaagtttccgactactgggctaacgggtagaaaaatcatctatgatgaagatggcaagccatgtagagcctgtaacactcttttagatttcaaatatgctactggaaagttagatcgaaaatctgtagcagcagcgacaaccaccactaccaccaggagtgtgaaatcatcaaagttaaatttaatccctggttctaggtcatatagaagcattccaccaccgaataaagaagaaataggaactagttcttggatgttgttgcatagtattgtctctaagtttgatgaaaaggaaccaacacagatcgaaaaaattgaaatgaaaagatttttagaattatttggcaaaatttatcctataaaagaacatggtcgaaatatgacacaatatatcaaatctaatcctattgatgttactaatagatctactttaggccagtggttaagtaaatatcataattctgtaaatgttaaattgggcaaagaatcatttgacactaaattttgggaagatagatgggtcaacggttgggattaataaaataagatagggaagccaacgtgtttcaaaaatatgctttatatggaatcatgtacataaatatatatctgattgtataaaaaattatctattcatataatgataaatctaatggtatggtactaccacccccacttggatatagtttagtaatattttgaaactttcgtggtgcaggcatttgtgattcatttatgctccaattaaatctagaatcatcgatcataatcttcgttttactaccgcttctaccatttgacgacccagaattggtatcattgttaacgttacttgccatcttacttgttgtagaagatccagttagagtatatgctgatgcatcaatctttgtacttgagaaacttccttccgaagcaaataatctatgttttactgatgaagtagaagatgtcgctacactaggatcattgctagcaccattgatagatatactatcattatttgtagcgtttgtttttggtaatgaaggagacgcatgagaagcagaaggaggaggaggaggaggtggtggtactacatgtgatatatgtatttgttcatttaatgtatttgatgcaaaagaggtttgtgtgactgaagcaagtgtactcgatggagatgatgcaacaggagaagcagacgttcttaagatagcaggtgatgcaggagcgagtggagcaggagcgggtggagcaggagcgggtggagcaggagcaggtggagcaggagcaggtggagcagatggagcaggagccattggaacaggtggaggtgatgttggtaagggaggtgcactacttacaggtggtagtgatgatgatgatactgagagttttgtactttcaatttgttcattatctaatgtaacatgatgaagtttctgatgatttaagatttgtgatgaaatttcatttgcaaaagaaaaagtagagtcatgaatgtttgtggaactattattgtgagttaatgtgtttgttgtagaggagggaatcggtggggctgtagcaggaagtggaggtgccacagtaggtaaaggtggtaccttagtaagcaaagaatgtgtatcttcagatgcatctacatttgaatgagaatgacttttcattttagactctatttcacttaagaatgacatcgaactatcagtagccccaatggcagctgtagatggtttactattagaagaggacgaaatagaatttgattgagtcacaggtttttgttctacataagtagaataatttgaatcctgactgactacaaatctatcatctctcttcttttgaatttcggctaaaaatggtaatggaccaccactaactacaggtgtatttgttgaagaaccactctttgaagattttccaggcttaattttagatttttcttttgatatcggtacatttggcattgttggaggaggaggaggtggtggtggggatgaagaagttgacgcagaaattatagaagatgtatttaatattgaagatggcggaggagcggatggaatagatggtgctgataaggttagcatagtaggggcaggaggagcaggaggtattgatgaaactttgggtgcagatattgtgggtagagggggagccgaaggcattgaagaggtatttgaaatagagggtatgggtattggaggagccgaaggtgtttcagataaagtagaggtatttggtattgaaggtgcagcaaaagtaggcagttgtggaggaggaggaggaggggaaataggagatgaaattgatgctgattcttttttaatagaaggcgtatgagaatcaattgtaggggcatttggaattggaggagctgataatgttggtggaggaggagggggagcagaagtaggaatagatatatgagaagaagtcgtagtagtaacatcaacaggtataggaggagcacttgtgggcagtagaggagcctcatatgaaattgaacttttcttctgatgtgatttaccaactggtctattagttgggatattgggtgttgtatctttccctttagaaggtcttctctttggaatggaaggagcctggagattaggaattggtggggcagaaccaattgtcgaattggatgatgatggattgacatgtttcaatttaggaaacccaccagctaagagatcacctaattgagggacagggggagccgacatagaagacattgtactattattagtattattattgttgttattattgcttcttgatgaatttgatgaggaggatatcacaccaccaccagatatctgtggtgctgacctatcatttgtttcagcctttttcaatgttataccctgtcttatttgacccaagagggcatctctattgagcattactgagggagcaggagtaggtgcagaattatcatttttatttgaagtgggtgggtttatacctggaatcatagaaggaggtgggggtggaggggctggtggtccactcatagttactctgatataaagttataggtcgtaaagttatattatttttatttttattctttctttttttctatcgcaaagatgatttaggtgagggaaagggggggggaaaagacaaaccagacctaaactatctcttattgtagttcaattttcttttgtaataacaataaaaaaaagtacaactgtgaattgtaatatatatatatatacatatatatatgagtatatgtgtatatgagaataaatagcatatactatttaatacaataccttatatttactatatcataatcttgtattaaatttttaatctttttggttaaatcattttaaagaaatgtcaatccaattagaaatgtctttgtcatttggaacgacaggtatcacaaaaagttgacattactaaaaagtatattaatattaatattggatatacacactgatacacatatacatacatgcatatatatatatatatatatatgtgtcattatcaattaaacaaggacaattaagaaaaaaggcagagaaagaaaaaaaaatgattttagattgttctaataagagtgttattgattattcaattgaagaagaagtaaccatcagatcaatcagatatcaagatggggataatctctatttaaggaaggaagaacgaaatatattgataaattctattgatcatttaatagataattataatgttatattctgtagatttattgaatataatgatgtgaaaatactgcatgaaaagggaacagcagtattagaatgtataatcataaaagcagttgctataatgtatgaccaaacaaaaaagaatatttgggaaacagaagaaaaaatactaaataagctgaaaacaatttttcaagtagataagacattacagtttgaaaaatggattgacagttgttattcaaccatttttaatgaagaaatatttaaaatattaaaattacaaatgtttatattaaatttgattattgataaccgagatataacatctattgatttaaatcaatatattaagatgtatataaagacaagtttaaggagtaaaatgttagaattgttaataccaatatatgaaatattgaaaaatataggaagagaagatatactattagcaaaatattactatagcagtactactattactattactactactactacttgtaataataaatcattatcgtcaccaaaaattttaccaagatcactatctcttacaacagaaaatttactaaaaccaaatccatggtataagagattatataattggatgattaatgtaatacaaaaaataagaagttttacaataaaatattaatagagaatacaagatacgcacaaaaaaacctacatacatacatacatatatatatagccatatgttttaattaaatatcaacattacaaaatagtcatttaaacctgctaagataaatacctctcctaaattaaggttagcaagagaatataaaaagaaaaacgggaaagaaagagaaactacaagatacatggcttttataagagcaataagaaccaacaaatcaacattttatacccataactacctttgaagattttctatataagaatatctgtagaagaataaatatttaaaacacatagatatctttttttttgatcaagtgtacattctgaatgcgttaatttcctgcgaatttgtctataaatagaagtaaaataaaagacgaaagaatcgggaaatatagatttctagagcacgtacatccatacacccaataccagcctcatcgactcgacggtatcttttattctagacacaacaaaacactttctttctttcatttaaagatgtttgtgtgtctttctttgttaatccagtgcaccgatatatatctatctgtgtatctatccacctatctatatatgtgagagagttatacaagtattaatcaatgatcgagtagacgagtacgcggattcggccagaatgccagtgattctgctccttccttcccctccacgaataattgcaaacgacacagtttaaactgttgcaatcttgaaagcccagtctgcaacatacacatgcaaacaaatgtatatacatatatagatatgtatgtatgtatgtgtttgtatatataatatagagatcgattgcaaccttggcaaatgccgtaattaaaaaagactaggcgtgtaaagaaaaaagacaccaatacaacacaaaaacgaagaaagaaaaatgaataaaacgcgcaacaaaaaaacacaataagacacgaaacctgagacggaaaaagggcttttcgtgtcatatgtttccttttggggttatataaaaaaccgagaaaaagtgcaataaaaaaaaaaagaaataagaaatcattctgactttttcgtgtattgccctttgttttctctaaaatctcgaagctttttttctttttgttgttgttgtttttttttttttttggcgggtggtccctctgccactattgttctattattcaaacaaaagaacaaaaaaaaaacagcaagaaaaaaattttttttctttctttgtcttgttgtttttctattgtttttcttttctttttttctgttgatagttgttgttgtttccctgaaaccactaacgacatcaccgtaacatttccgtgcttttttttatttttatttttattttttcttaccgcttcgcatttattttcctaccacagtctctctctctctctatttctctctgttattatgctccaacatcaacacgcctctccctctacgtgtgttataataacacataacaatatacaattgtacttacttatttctgccttttgtccagtttctccgttttaaaaaaacctgattttgtaacaaacagatcgaactttttgccagaaataaaaaagaaaaacaaacaaaaagaaacaaacaaactacaatcaacgatcatttctttctttctttttttctttcttttccccctcttgatttgatttaacctgtttttatatatatactttataccagccttggtgcctaaggtaacttcttttctttttcgggtaggtacgtccaatctttgctgtttatccttttctgttgcacacttacctactttcttacagtctaattgcagaagaagatacttttagcctatttgattccattatttaaaggtgtgtgtatacaaagtgcaaagtgcaaagtgtgagtgtgagtgtgacaaaatatccatattcctacaataatatccttatacatatccaagtgtctattattataactatataattattttttttttttgtttgttcgtttctttttcttttttcctttttattttttccaactggggtaaactaaactacattattcaaacacagtggaagaaagaagaaaaaaaaacaaaaaagaaagtagatagccaaataaacagaatatataaaatttattcaaacaggaagacaggtgagtgaagtactattaacgatcatccagttctttttcctttctcccctgctttactcatatttttatatatttacttattttttttccccttctttttttttatcgaaaaacacaaacaaaaacaacaaatactagtagtatcaagaatcataagaacaagcattataagtatagttaaaagaaaaaaacaaaagcaaataaagagaagaataaacaacacatacaaaacgtgcgcactcacatatacatacttacgtatttatatatccatatccacaaaagagaaatatatctaagttattattatgtcgtacaataataataataataacaaccagaatattgatccaacccaaaattttaacaatgagggtgggtaccaagatcctcaaaataatcaatatttctactatcaacaacaacaacaaccgccacctcaacaacaatacgatgaatatggccaacctgtcaacatgatgccaatgaataacggtggctactacgaggattcttatatgcaggatatgaaccagcctcctaatatgatgatgtctcaagataatatggaaaacttctcagatttctcctcctatggtcctccacaaccgaataatggctatatgatgaatggtggagacccacaacaacagcaatacactccttcgcaattaagttacggtgataacatgaacacaggctcttctactccattgatgtatgatcctaatgccatcgccatggctttaccaaacgatccatatcctgcatggactgcggatccacaagctcctataagtatcgagcaaattgaagatatcttcatcgacttgaccaacagatttggtttccaaagagactcaatgagaaacatgttcgaccatttcatgactcttttagactcccgtgcgtctcgtatgtcgccagaccaggctctcttgtctctacatgcagactacatcggtggtgataccgcaaactataaaaaatggtatttcgctgctcagttggatctcgatgacgcagtagggttcagaaatatgtctgttggtggtggcggtggcaaaaagaaaggttcttggagatcaagacgtaaagctaaaaaggccgccaagaaggctatgaaagaatccgtggaaaatggtgattccccagagatcactttggagaaaattgaaggtgacgattctttggaagctgctgatttcagatggaaagctaaaatgaacgtgctaaccgcatttgaaaagactcgtcatattgctctgtatctcttaatgtggggggaggcaaatcaagtcagattcacaccagaatgtctttgtttcatctttaaatgtgggttggattatttagaatccccattatgtcaacagagaactgaaccaatgccagaaggtgatttcttacatagaattattactccactctataaatttatcagaaatcaagtctacgaagtccaagatggtagatttgttaaacgtgaaaaagatcatgctgacgttataggttacgatgacgttaaccaattgttttggtatccagaggggattgctaaaattgtattaaatgacgacgactctaccaagttgatcgatatccctgtggaagaacgttatttaagactgggtgatgtcgaatggaaagatgtcttcttcaagactttcaaggaaacacgttcttggttacatttgatcaccaatttcaatcgtatttggatcatgcatatctgtatttattggatgtatgtggcttataatgctccaactttctacactcataattatcaacaattagttaataatcaacctttagcagcttatagatgggctactgccgctttgggtggtactgtggcatcactaattcaaatattagctacaatcttcgaatggatgtttgttccaagaaaatgggctggcgctcaacatctatcacgtaggttttggttccttgtgggtatacttgctttgaatttaggtccaatcatctttatctttgcttatgataaagacacagtttattctactgcagcccatgttgtaggtgctgtcacgttcttcattgctgtcgctactattatcttctttgctgttatgccattaggtggtcttttcacctcttatatgaatagcaaatcaagacgttatgtggcttctcaaacatttactgcatcttttgccccattacatggtttggatagatggttgtcttattttgtttggtttaccattggtgccgctaaatactctgaatcctacttcttcttaatcctatcattaaaagatccaattagaatcttatcaactatgacaatgagatgtacaggtgaatattggtggggggctaaggtctgtagacctcaagcaaaaatcactttgggtttaatgattgccactgatttcattttattcttccttgatacttatctatggtatattattgttaacacaattttctccattggtaaatcattctacctaggtatttctatcttaactccatggagaaatatcttcactagattaccaaagagaatttattctaagattttggctaccactgatatggaaattaaatataaaccaaaagttttaatttcccaagtttggaatgctattgttatctcaatgtatagagaacatttattagctatagaccacgtccaaagattattgtaccaccaagtcccatcagaaatcgaaggtaagagaactttaagagctccaactttctttgcatctcaagatgataataattttgaaacagaatttttccccaaagattcagaggctgaacgtcgtatttctttctttgctcaatccttggctactccaatacctgaacctctacctgttgataacatgccaacttttactgttttaactcctcactatgctgaaaggatcctgctttctttaagagaaattattcgtgaagatgaccagttctccagagttacgttgttagaatatttgaaacaattacaccctgttgaatgggattgctttgtcaaggataccaagatcttagctgaagaaactgctgcatgtgaaaatgatgaaaatgatccggagaagtctgatgaattgaaggctcaaattgatgatttaccattctattgtatcggttttaaatctgctgccccagaatacactttaagaaccagaatttgggcttctttaagatcacaaaccttatatcgtaccgtttctggttttatgaattattctagagctattaagttattataccgtgtggaaaatccagaaattgtccaaatgtttggtggtaatgttgatggtcttgaaagagaactagagaaaatggcaagaaggaaattcaaatttttggtttctatgcaaagattagccaaattcaaaccacacgaattggagaatgctgagtttttattgagagcatatcctgatttacaaattgcctacttagatgaagaacctccattgaatgaaggtgaagatccaagaatatattctgctttaattgatggtcattgtgaaattttggaaaacggccgtagacgtcctaaatttagagtccaattatctggtaatccaattttaggtgatggtaaatctgataatcaaaaccatgctattatcttccacagaggtgaatatatccaattgatcgatgctaaccaagataactatctagaagaatgtttgaagattagatctgtcttagctgagttcgaggaattaaatgttgaacaagttaatccatatgctccagaattgaaatatgaagaacaaacaactaatcatccagttgctattgtcggtgcaagagaatatattttctctgaaaattctggtgtcttaggtgatgtcgctgcgggtaaggaacaaacattcggtactctttttgctcgtacattatcccaaattggtggtaaattacattatggtcacccggatttcattaatggtactttcatgattaccagaggtggtgtttctaaggctcaaaaaggtttacatttgaacgaagatatctatgctggtatgaatgctttacttcgtggtggtcgtattaagcacgttgaatattaccaatgtggtaaaggtagagatttaggttttggtacaattttgaatttccaaactaagattggtgccggtatgggtgaacaaatgttgtcccgtgaatactactacttaggtactcaattaccactagatcgtttcttaactttctattacgcccatccaggtttccacttaaacaattttttcattcaaatttccatccaaatgtttatgctaaccttggttaatttaaattctttagcacatgaatcaattatttgtatttacaacagaaacttaccaatcactgatgtcttatatccaattggttgctataatttagctccggctattgattgggtcagacgttatactctatccattttcattgtgttctggattgctttcatccctatggttattcaagaattaattgaacgtggtgtgtggaaagcgacccaaagatttgcacgtcatatgctatcattatccccaatgtttgaagtgtttgccggtcagatttattctgctgctttagtcagtgatttgactgttggtggtgctcgttatatctcaactggtcgtggtttcgcaacatcccgtattccattttcgatcttatattcgagatttgcaggatcagctatctatatgggttctagatctatgttaatgttgttattcggtacagtggcacattggcaagctgcattgttatggttctgggcttccttatctgctttaatgttttccccatttatcttcaatccacaccagtttgcatgggaagacttctttttagattacagagattttattagatggttatctagaggtaacagcaaataccatagaaactcttggattggttatgttaggatgtcaagagcacgtattactggttttaaacgtaaactaactggtgatgagtctgaaaagactgctggtgatgcaaccagagctcatagaagcaacttaattgtagctgaaatcattccatgcgcaatttatgctggtggttgttttgtggcatttacgtttattaatgctcaaactggtgtcaagaatggtcctgatggtactgttaattctgtcttaagaattattatctgtactttagctcctattgcggttaacttgggggttttgtttttctgtatgggtatgtctatgtgttctgggccattgtttggtttatgttgtaagaaaactggtgctgttatggctggtattgcacatggggtggccgtagttgttcatattgtattctttattgttatgtgggttttagaaagtttcaattttgcaagaatgttgattggtgttattacttgtatacagtgtcaaagattaattttccaagttataactatctgcttattaacaagagaattcaagaatgattctgccaacaccgccttctggacaggtaaatggtatggtaaaggtttaggctgggcagcatggtctcaaccatcgagagaattaacagccaaggttgttgaattatctgaatttgctgcagattttgttttaggtcatattattttaatttgtcatttaccattgctattgattccacaaatcgatagattccactctgttatgttattctggttgaaaccatctcgtcaaattcgtccaccaatttattcattaaaacaagctcgtttacgtaagcgtatggtaagaaaatatgcttcgctatactttttagttttggttatttttgccgtttgtattatcgccccagccgttgcatcctcccatgtccatgatcttggtaagagtttgactggtgtggctcataatttattccagccaagaaatgtatctaacaatgatacaggtttgggtatgtctacttacaagagtcactacttcactacaacgatatccatgaagacttggtctactatcaaataaaagaatttatgaaagtgagtagaattccctgtaatttataaatattcttatcacttccaaaggacaaaaattgatagagactatataaactgcaattacgttattagttagtaagttatgcttatttgtttatttatgcctatatatgtatgatataggcagggtttatgtattttagttattcctaataaaattacatcattcacgttgttaatttgtctatgaacatagtagagttattttagtgtaatatcatgataaccttcaaaaagtgtttcttacttttggtgcaatatttatttagttttttttcttaaataaaatttctgtgcaaaagaaatcgtagacaaatgtcacaaaataacaagatatatttcataattatacttataaaataaagctaacatgttgcaagatttaaaatatcaaaaataaaaatcaagttatagcagtacacgtaatgttgataaccttaaaaagtgttttagtagtctctctgctagacagggtttgtttttcacatatatcacaggaattccctacaattgaaacttttggaaataaattctttttttctgatactggtgatcaattctttattaaaggaatagcttatcaaccaaaaccacaaagttttaaggaaataaatacactaacaaatatagaagaaaaccaggaagaggaatatattgttgaaaataacattgaatacattgatcctctaggaagcccaagcatctgtttacgtgatattccgtattttgaaagactaggtataaatactattcgagtatatgctattgacccactacaaaaacatgatatatgtatgaatgctttgatgaattcaggaatatacgttattttagatttatctgaacctaacatttctattaatagagatagtcctacttgggatacaacgatttggaatagatataaggctgtaattgattcaatgcacacatacaaaaatattcttggattttttgcaggaaacgaagttacaaacgatttaagcactacagaagctagtacatttgtaaaagctgccattagagatacaaaaaattatattagagaaaaacaatatagaaatatacctgttggatactctacaaacgatgacatcaatacaagagaatcgttatctaagttttttatttgtggtgacgttaaagtggatttctatggaataaatatgtatgaatggtgtggatactcttcttttgaaatcagtggttataaagaaaggacacaagagtttaagaattatccagttccaatatttttttctgaatttggatgtaatttgataagaccaagaccttttacagaaataaaagcactttttggatcacaaatggcaaatgtttggtctggtgggattgtgtacatgtattttgaagaagaaaacaaatatggtgttgttcaactgaatgaggaggatcaaagtgttcatgagttggatgattttgaaacactttccagtgcttttaataaagtatctctacaaaaatttaacaaagaaaattatactaaagagttaggaaataagaataatttttctatcaactgtccaagtttatctccattttggaaagccaatgaaaaattaccaccgacaccaaatgaagatatatgctcatgtattgatacaaatttaccctgcgttattgtaccttcaaaggaaaatgttaattatgaaagtatgttcgagtacctttgtggtgaggttgattgtacagatataaaatcggatgggtttctaggttattatggtgagttttcgggttgctcaacagaacaaaagttgtcactggaaatatcgaaactctatatgcaaagaaatgaaaacataaatatatgtccctttgattccaaaggggtaacttttaaaaaaatccctaagaaaaaaaaaacttctaatattaacaaagaagctgatatatgttcaaatattcttaaaaaaataaataataatcaagaaaaaaaaatagaaggtactaattcagagaaaacaactgtgacatactcgaaagcaaatattttaaaattgggttctaaattaacttttttaatttataaattatatatattaactctatttttttagaagttgaaaataagtatttttttatactgaattaattatattcatatttactaatcaataaaagattctagataataatgcagtgtatcgctaaagatgtttcaagataacgatatatttgagttgattaattatttttatagttgtagttttcaacatcattttattattgttattatgcacttgcaagaatataataatcattatttgtgaaagggatggttttttgcaatctaatagaatatactcaaaaaaataaaagaataaataagacacaacacctcaaatagtgttctgctacattaggaaaacaaaatttaagatacaactatttgtcaatactctataaatcaaataaataataattactttttttatttattttctattttttgttttttttttcatcgaaaagcgtttatatatatgttgagattttgtattgaacttgtcaaaatcaattcttttgtgccataaaaaagcaaatgatctgtaagtgttgagaatgtgcgcctgtagtcattggatgtatagtaaacattctcagtattatattagatagatttagtatacaaaattataataaagttcttcgtttttttttgtttatgtatataatgtacaatgataaaatatagaagatgaacaagggaagaaatatgatatgaaaaaaatattggctttatatattttcatatctggtctatctcatctacgtacggcaccaaatttatgatgaagtttgtttacgtctactgataagcaaacaatacgttcttcactttttacttattaattagtgtttaataaaatctaattgttctgttatttattctagaacgttcgattctagcagtaaggtagttgtaataataatctgtataaatattatattattaactaaatggatagtaaagcatatacaataaaaaaaaataaatacgtcataagatctcttttttttttttatgacaccttaacaatgtatttttgtttttgtgtctacaattcaaaaaaaaaaaggcagtttatgatgttcagttaaatattaattattggagatagacaaagagccattcatacagtttttatttcatacaataagaaaattactttgttgtctttatgcaaagtgccctaattggaaatcctgaaatacgcagtctgcgtgtaacgcctaatgtcgaggcgaaggatttggaacaaccgaaactctggacccaaggttgtgagtgtattcgaacgaacatatgatcgtcggatggacattggtggcaaattatgaagaagcttacttaagagacccttgaatattgagagttagtgccagaggtaattatcagcattaatattcgtaatctatctaatagattaattaattaaaaagacgaatatccaagactgatctatttagtagtaagaatcagccaattacataatttgtaagtgtttatatatataattaatatccatattttagtatattactttagataacctttacaagttatttttctagaacatacaatatttacaaaaatacatattaaatatataaagaagaatattatcattccttcttatatattaaaattatatctgtaattttaaatatttagaaactctttaaacatgttttataaaaatttactcttttacttttcgttattaggtaactttgaatttggtattgtgaaaatttttcatgaaagaaaggatggatttttaatggttgaatactgattttgttggaaaatgagggcttattattgtcatttccatgagaattatttttaattagtttttctgtgtatcgtgtggtgcacgagtgtaccataatatcaggatgacattttatttttcaccaaatatgtttttcagagatttgaagaaaaatgaaaaactttaaaagaaaacttgaagtaaataaaagaatatatactaaatacactatataataagtatatacatgtatttaataccaaaataaaatcagcatctataacttaatgatgtctgccataatcatggacgttaagtgcaccaacttccaacagatttactttagcatatttatttactaaactattaataattaaggagaatacataattttagtctaattctctatatgttaatgctagatatcataaaaaattttataaggttctgattttttgcaacatctctatataatattctttttttttcaaattggaatatttttgttattgttaaagaatttaaaatatcagttactttgataacttaaattaacaacaatttatactaatttttttttattttggataatatatgtcttctcctgtcagtcctaaggtttccttataatactatacataaaaagtatactaaaacgttagttttatatatatatattttcgactcaaagacaatcttttgtttttatattctataactttagtagtagatgaagaaaattagttatgtgttcctatcaagggatacttctttaaatatgaccaacaaaagattagtacaactaacttaatcaccatttacctttttggaaattaggacatgaatattcactgttatggtagacaacttcagagtataatcatttgttttgctttacaattatatatatagtttttagatactatttttactataaactttactgcgcaaatatgaaattaataacttcatttttacacattacttacgttatcatcatcccatttctttacaagagatgttgtagtatggtatggtgaaattctttgtgtattccagggaagcgcaaataatattaatagtcattcaagtaatcgagacagtaatcaattataggcgataatataattactaaaacggtcttatatattgagcggcttatatcgagctaatatatttattcaaagttacttaacttgttacttgcttgttgttctatttttgttcatatataatatataaattatttacaagaaacggttatggaagatgatcttttatctccagaaaacgttgtccttttatatgttttctggagctcgatcgattattcagattactacattaatgacttgactgattcaccctaaaatttattacattaatttaggtgcactactggattagaactgcatcccaattctctaatcatggtgattagtaatacacgtgggacttaataaaacaataggtaaattctagatttgccaaggtcttatgtaatccaatctttttattatgcagcatctaatgttgtagcacatgtatggcttattaagacaactaaatagttctagattcattcaagatcttatgtaatcttgatggttataactattctattccacaacaagagattattgaaaatgcccttttagtgcaatggttagcatgcgatcttccggtggttgtgatccgggttcgagtcccgggaggggctcagtttttgctaacttttttaactctgttaatacgtctgacactataaataattgcacgcagtaatgataatataagatctttatctttataatatgtacttcataacttagaattaaccaattttttcgatcttacttaatattaataaaaataatatagtagattgcgtattattttttgcaaaacatcttttcggatgtgtatattaatgaaataattattctgttgacgttatgaataaaaacagtaattttttaaccaataaaaaaacttaaaatctatttctattatatatctctcttgtatcttgagaaattctttaataatcatctttaaaacatttacattattttgaatatgatatttagcaatgtatgacttttataaaaagtgttttatttcttattaataagctccagaaaatagcttgaggctgatatattatgcagatattctagaagatatagaaaaattaatatcttaaatacattaacatcgactaggcaacactttttaaatcttttagttgctacttttttcctcttaaatgaacaaacgtaaaagaaaaaaatagataaaaaacttattttggactgttagcaacacccatacatttcacaaattcatttttttagaaaaaagtgagtaatatctcatttttacatgtatattactattttgggtaagtattttgctttttatttttgggataattctactagaatataaatataaaaggaaagaaaaaataagaataggaaaaaaataaaggacataacttaatccgcgtggttcttggagaacccgttttaattttttcctcaccaaaaggtagcttttctttttgggttattctattaaccaaggcttgcagagattggatctagtgagaagcccatatacttccagcatagactaataggagcaaaatagtctttctaactgtatccttttcccggcgtgttccttctgcatgcacaatcctttcagaatacacgagacaaacataacttttcaaagctgtttcgtctacaccgtctgtagaaatcacaatgcccccacccttcccacttaatctttccccactgtttgcttctattctacctgttgtctgcttcatctgccagtgtttccaggcggagagaaacagaatgccaggcttgttggacggttcattctgaagacactcagattctcccagttgtcccggaccaagttcaagattttccttattattaccttttctactgtaagaaagtgttcctactaggggtaatgtctctctatacagtccagaatacttcttgtagtacctaatcgtcagcacgcagtaagcattaatattaccataaataaacatccattctataatatgttacagttagaatagcagtatttttgcagcttgtcttggtagcagtagtcttatcttggcccatctgagaagacccgagtaataacaccaggaataactgtataaaaatggctaagcaatctttaggtatgtttttttatgctatggagagagtaagatgtaacaaggcttttaagaaatatgaattatttaaagaattaggatcgtaatattcaataatcgagtaattaagagtgccacaaactttcgttgtttttcaaataaatttaaaatttagccgattatattcaattcatactatgagagaaactttttttggaacataatgagaactagacttttattttatctttgcagcaaaaccgtgagaacagatattattaatatataatctgaaaagtggattgttgttattttcccatatatttgtatggattggttttttttccaagaattggtttcaaaagctatcaaattagataattatatttctcaaccatattattagcctggtgatgaaaacgtcaaatgccagaaaaacattttactaacatatggaaattattgtttcaaaattaatatattggtctaatcattaactgtcaaatatatatgtttattgaatcaatattcaagaaaaatttttttttaaatttaaacagatgtttcctctgacagaaataagtccagaaaggcttacttcaacgctccatcttctgttcgtcgtgtcttattatctgctccattatccaaggaattaagagcccaatacggtattaaggctttaccaatcagaagagatgacgaagtcttagtcaccagaggtgccaagaagggtcaagaaggtaaagtttcttccgtttacagattaaagtttgctattcaggttgacaagatctctaaggaaaaatctaacggtgcttccgttccaatcaacattcacccatctaaggtcgttattaccaagttacacttagacaaggacagaaaggctttaattgaaagaaagggtggtaaattagagtaaatttttttttaaaattttaaataattaataaaatatcattcttcattttttatctttcaatctcgttttgtctgtatttataattattttgcaactatatacataacaacagtactttaattttcaaaacaagaaatactttttaactgaagtaatttatatattgtacatgtatagattattgacgagtgtctgtatcatagtatgtttcgagtgattacagctgcctatattattgtttgtttattgttattgatgtaattttctatcgtttcaaattactcctatgagccgtttttataataattttattaagtaaattgacttaacaataaggcagctattgtattattattattattatttcaggtattatcactgcaaattcagtcttatactgtactatataacagtaaataaccaatccttttagtttttccttacctataagattcattacacatttcccttctaaaggtttttttttttgtagtgggaaacggaaaaccacaaattgtgaatataataaagatgatgacgaaggaagcggattttacttaaaacaattcaaaagacgaatcaaataattctaagagaaaattcttatgtaaaacttttccactgaatataaattcattattatttattattttatgagtatatttaaaactttttaatgcaaacataattttatatcgagggatcttcataatccaacacaatatatatacacatatattaaattaatgaaaaatatcatttttgcgaatctaaattgtatgcagtaacaaatttattagatatgagaatacctatattttggctctatttttgtccatattataacggagtcatatggtggagaaaaaaatatgaagaattattagttatattatacaaatatgtattaattgatcacaaaaaaaatcaaatatttataatactacactaaaggatatttagctccatataatttgttttgtaactcaaaacaaacgaagtttatctttctccaatgactaatatgttagttgtatactacttcagattgccaaaacatgaacaacttaaaaaatcaacatacataagactaggccatatatttgtagacaatgaatgaaaatttagttcaattttatgtatccaagtttcatcattaactacttcttattgacattcttagcagtcataatagtagtaaacctatttggaaaattatgatgttaaaagaaataaaaaaaacgtttaataaataagttggaagtcaacctttcgataaagtaagatgatgtgaatgttgattcaactctacggttgcattctccgtaagaagtaaaaagttggtccctttttccctatgcaaggatctgataaattattatcttactttgttgaatccaaataggcatcattatattaatttgttaagtgttaggaaaacatcttttctaatggttgtcaataaaacaattaattttgtaccaagttaagttggaaatttaaaagaagtacattgatgcatttcttcaatgaagtcagaaatcaagagacaccgtgaaactactactttttacatatgcattgtctagtacttcaataaaaaagcaaagaagaagttggtaaattcagatgatttagaaaaatatctctgattatatatcaaatgacactcattaattatcagaataactaagaaaagaccttatctgcaatatttcatgttgacttgtagcataatattgattattctttagtcttagttatagcttgtcagtaatacttctctttattattttctttgtttattcgctttatttagtaattttaattttaacaatttcccagaaaagaaaaatgaatctccgaaaattaccattttaggaaaacatgacagttttgaactttgtaactttaaaaaataatagaattacatactaaaagttcataataccaaaaatatttaactttcctggagtttttttacctttcaaggactctaaaattaataataagtagaatattgaaaaacacatacaaagggagaacaaagaacgttcgaccactttcttagaaacatagtaaaaggtatctcgtagagagaataaaataaccaaaaaaaaaaaaaaaaaaaaaaaaaaaaacagaataaaagagaacttatgtatatttgtataacgttctcaattcacagaccttcaaaaaaaaataaaataaaataaaatagaaataaaaataaaaatacaataaaagaaaacgactcttggagttttaattttcaaactggtacagagtttaattaagggaaatattatcaaacatgaatgttaataaaaacaacaaagaaaactttttaaaagagaagactttaaatgatgatctagactataggaaagatgcagttcatgaaccagtagactgcggatgtccaatggcaccaggacaactgtatccaactgaaactggaacattatttcacgctggtaacatcttgattgcattggttgggctacctgccacatctaagactttattggctgtatcaatgacaagatatacaagatggttaggtgtaagaactagatcattccatgtctcagagtatagaagacacaaaagtaatagaaatattgctctaagtttgaaattcgaacaagatatggtggacgaagttcttaaagatattatcgatttcttcgaaaacaaaaaaggtcaaattgcaatctttgattccttgaatattcttaagtctgatagaaagagattagtatctctttttgaaaatattaatgttaaagtattgtttattgaatcaatagtgacggatccgaagttagttaacaagaatatcgaaatagcattaaaatccaatcaatatttaaattggagaaaagaagatgcaattgattattacacgaagaaattatcaataaaagaaagtcaatatgaacacattacacctgatgagaactgtaattttctaaaatatatcaattttggagagcaactaattataaatcataataatcaattaggttatctgattaacaaaatagttttctttttaatgaatttgagaaataagactagtcgtgtttacctagctagatgtgggactagtgattcagataaatatacaaatgatgaagtcttgaacgaagaaggaattcgttactctaaaaacttaacagatttagttttagatagggttgggatgcatagacaaggaaaaaaagtagatacagagtctttagttatatggactggtccaaggaagagaacatatactactggtaagttttttattgaaaaagggtttgatgtacaagaaagaagccaattgaaacaactgcaaccaggtagcgttgctgacatgactatagaggaaattaaagaaaagtatccaaatgaacatgcagaatttttaaaagatccgtatcattatagatatccaagagctgaatcatatcatgatttggcggttagaatggaatcccttttactggaattagaacatatgaatactaatgtcttgattattgcacatgaatctactttgagagtattatatgggtatttgttagcatatacagtgttagatgtaccaaagttggagttttctagagaatttttgacagaaatcacttttggaccattctgtaatactgtagaaaaaatccctattaattagggattagaaataaatattgataaaaaatatccattacttaaggtaaaattactaagtccttatagtaaaaataatgaagcttttatattcttttcttttattttacattttattacatttttcatacaacaaattaagaacgtacatgggcatatcgttaccttatcaaagaaactaattttctgtacatgtaaaatcatgactatattttaaatgtatgatatattactcttaaaaagtgttaaaaatatctgttgatgagttatatgctttaaacacttatgattagtttattttctctatatatgagaaaactaaatgaacatatgatgaagttatggtacactctaaagagctgcaaaagcagaaaaactttctcttaaatgagcttttgtgttacagtgattttacacagttaccaaagatattgaatgttcagcctattgtatgagattatcttacaactgtgtgcaacttattgttactctatcaattgttattttttctaaggttcttgtagggatctccttaatattgaataaaaagaacatatatacagggaaattttataacaataatattcttcatttactatgtaggttaaattacacgatattcttaacttttattaatgagttttatgtcaacattaaaaattaattttgtatcaaactttttgcaaatattcttaaaaaaataaagccaaaatgttaacaataaagagtatgtttcaagttgatataacataaaatatttactttgttaaattccgataaaaaacatagagaagataatagtcaataattaattcttctttataaatttattggggagtaggatgttaaaaatgcatttacataaaacaacagttgcattaagtgaaatattcttaagtcaaaaacaaaaaggaaggtaaacaaaaagaatcctaatttgtttatcttgcttgttgaatttaaattataaatatatacttatatatattcaggttaaatatcaatagtaaatactattggaattaaaattacaaaaataattagtgaataaatgcatagagagtaaagaaagatgactaaaaaatttgaaatgttacaatatggtcaaataaaaaaataataaagaatattatgaaataaaatgaaaaaaagatcaaagtacaggaggcaacaattaaaatgtgtgagaaggagaagaaaaaaagaaaaaatactattagtaatgaaatgataatattactttagcaacgaatgtaaaaagaaaaagtagaaaggtaaaaagatgagagataaaaaaagaataaaaagaaaaagaaggaataattaaataaaaataaaaaataaaaaaaattataaacttttaatcaaaaatgattaaaaatagaagaaatgtatatgggttcaataatgataataatgcatgcaaaaggggggaaggagagaaaaaaatgtcagaaatattagaggtagaaagataaaaaaaatgggtgagtaataaatgattgagttaatatcacaaggttaattggtgcttttgttgttccctagcccatcttgcagtagctttagtagactgagagaatgttggattacttctcgttttcttaataaaatcgatgatggtttcttggccgtaaaattgcttaatagatccatcaggatacatagctgcaatgtcaccaattaaacctactgcagatctggaaactgagtcatcactgtataactgtggttcttctgctacgagcgttataaattggaaaatagttccaacgtactcgtagataacttgtggatttgtgtgaagaccacctacaataccaacataagcgtctaggactgcttcaagcactttaatatagtaatctatagcatctaaactgccattttctggttttgtattttgggctgcaacacataaattcataacatcacctagatatggggtaaagtcagcaccaatattggaagctatatcaccaaacacacttaatactgccggttttaattcttttttggagttagaattggagatcatttgacctaaaacactcatgaatgcacttgcatatttcttaaaatcttcacccaaagagttagcaatatcagcaacaaagcctactgcagtaattgcaatagtggaatccacttgatttaatgctttcacaagatatggagaaaaggcctctaaatatttttcaaattttgaacctaaggagaatgacaaggaagacactgcataaaaaacatcatcttcgataaatgtagagtcttttttatctaataatttcataaacaattccattagcatatcggaaacagtctcaacactacttggtgacttcctaatcacagcagcaagaacggttaatatattggattgtagttcttgtaaactttgtagagcctccataggtaattgagattcatcaacagacatagtttgtcctaacttgtccataacaaagctagaaatagaagcagttgtctcagcaacttcgttgtttgaacattctacaatggtggttaaggcagagaaagcagaagctctggcattaaactcgttatcagatctgttagctacagcaattaatgagtcaacaataactgggtaatagttaaaaattggggatggagtctggtccgctaactgttcaactaggttaataatggtccacgcacaattagcagcaatctttggatgatcgcctaatccactgacacaagaatgtataacatttggtaaatgatctttaatgttaatagcatctactactatatcagcgattctaccgatacaccaggctgctgtttcttttacttgaagtgattgatcgttcattaagtttaaaatagcaggtagagcctgatgaatataatatatcttttgatctttatttggaccttccataatagaaccaaatgccataactgcagcttcacgtcttctccaatcagaatttgtgatattctgttctacaaattgtaacacaggttctaaaatagcgtcaccacagttttgagcaaataattgtagacagacacctgcagacattgagacattccaatcatcatcttcaaaatcttcgttctgtctagttagtaactttaacaaagttggtacaacatcttttaaagaggctaatgcaaaattgaaactctgtaatggagatcctgggaattgtgccaattcataggcaatatcgatttcttcttcacaaatagtagaccagaattcaactgtcattgaagcaaccttatcatctgctgactccatagtagatatagtcaatgcatacaaagcttgttccatatatggtttcatgaaagaatagtataaggacataattctacaaagacaaccaaaagctgcagcttggatttcactctcatttgtctgggtggcttcgcaaacaacttgcattaaataattcctttccccttcacgttccatgttatttttaataaatattaaagaatctgctaaagcatttaaagcagctaatctgactgctttagacggttcggatgattgagcaccttgcacaatcgcaattaatatattgttggactctgatattagagcttgagattgaggatctgcactttcacaaatatagcctaatgataatagggaggctcttttgacattttctggttgacttgggttggtattatcaaccataattttcatcaactctggccaatcaccaattggtaattcgatgtctgcaatagcagcaatcaattgagcagcagcatttgctacacggtcctcggaagatactaaagcttgtagtgcattatttttaataagttgtttagagttggtgtcaatttgtgtaatccaacgttgtgcaaactgtttagacctaacagaatctttggcaattaattcattctttaaagataaagcagctaaaatacgtgcttccatcttatatgacttttcaattaacacttgagacaacagtcctgcatattgcaagaaattctcatttgataaagtctttaattgagtttcactttgaagacggacattaccatctggatttaaaattgtgttttctaaaagttgggcaatttcagcagtggacatgcttattgttattcactttttgtaatattttaatatgtctataattgtaattataagtgtaactgtaaatttcaaacgcaatattgagtcaaccaattcaaactaaaatagatgctttcacagaatgtattggaatttttgaactacttagactctttgcaaaattaaataacaaaggcaatattcaatccgttacggaatatagttagattgtattttttcaggtgatccttgaaatcactaaaaaaaaagaagagtgtaacaggagaagaaagttttgtagtagtactcgagtctttaaaacaagaaactgagaaaggtcgttacaatatagccatacatagagaaaacaaagtattattttgcttactcttcgtccatcacttctttaattgtttttgttaaattttcacaaacatttcaagtttttcgtcttctttgaaaaaaatcgtattcgtataacgtgatatattttgaagaagacccttttttggtttgttttttgttaacgttgatgataatcagcacgggtagacatactaataattgtatgtaaaaagatacatatacataattttttttggggtctatatacatataaatgttattatgtaactacatgctatttatgagtgtgtcaatttaagtgaatgaatcgaataatcaaacgtattgaataaaatcatcaagtatatgtataaataaattaatcagtcgattaaggactaaaaaaagacatagacaaacgaatataagatacagtcacattacacgtactcctcctcctttacaccaaccttatgtttctttaattgttcgatagcaaagaaaattagcatggtaaatgggcctaatctagtgaaacttggtaaccaacctctaaacataaatgatggaccttctgtacgtaaagcagtcgttaatatttcaatggatgacttattttcagctttacttgcattcataatacgtgtcttaatgacatctgctggagaacagattgtagtggccactaaccctgctaataatgaggcagaaaagtgtgtagtcttatttgcaggatcaaaatctaggttagtcactagataattcttaaaaatatcatatgtgaccacttgagatgctgtcattaacacacctctgaccatatttggtttccaaccggtcaataatgtcttcacacctccttcatgtctatagattttccaaacaccatcaaatgcgtttctataatttcttcttaaatgaggttctaaggctgagtcattttgcattctgatgttaacaacatctgcaaaattaccagccagaccaccgacagcaccactaaacatagaacttggtaagagatatgccatatttgttaattctttttgtggaatcacatgttctttcaatagatcatatataccgaacctaacagtggtataggtacattgtcgtaagacagctgcgctaagtcctgaatatagtcctaaaacaccttcattccttagaatatttgttagcatttccactaatgttggtttaggtaaagatgcagcttgtaaccttacttttgctaaatctaatgggtgagtgcagatacaggcgaaaatgcctgcaacaccaccataccaccatggatatttaatttgtttttgtagttttctttcttcttgttgttgcgacattctttatgaaatggattatggttataacagtatgtaaagatcaaaagtgggatattttattgttaaatttgagtctattaagtaatctataaaaggataataagcagaaataaggataaggggatggaaatgaaaggcagaaaaataaggtgaaaattaaattaaaaagcaaagtatggaatagataatgatagatattgcaacgatctaaattacaacaactcagattttactcgcttctactatctgatacaaaaaagtttgttagtgaaatgaattcttctatgtatttaatttttgtcaagtcaatcaaagaaaaaaaaaacaattttgcaaaggaaatctataagttacacgagtatggatcagtgaggaaaagtaaaatctaataatacaacacccaatgagctaataggtttttgttatggtgttgaagaaacaagtaaagtggatatttaaggagaagcggtcagattacgtagagagctctctagatatgtcaataaatttagcgtcaaaatgatttatagatacacacacatatatatatatatcctgaagtagatgccgtcaatctacgttgtggtaaggtttcagtagtttcatagataactaaataaagaacagcatgattatctatggtcattcattagtatatagtaatttgccgtgaaaattgtgatttctcgtaggttataagcccattctctttcaagtttgatgaccaactctcaattgaattttctgttttttttttttttgtgatataatttcatctattattccccttgtgatagaattttacatgattatttctcatatttttgtatagttcagattatatatttacgtaatctttgttaagacctttcagttttttttacgtttgaaaaaatactctaagttagggttacattaattttgttgcgttcggcataaaactctttagtcagtttttgtttttctgtatttaatttctttaaatttttaatttgactgacgtgtacaactcagggttttataaaaattaacctttatgtaaaataaacaaatccactctaatacagggttttctagttttttttagattcttttggaaaaagtgaaagaaaaagaaaaagaagtggaggtcacgcttttttaaaagttacataatatattcatttatttttcatattatattaaagaaattattacaaagggatttttttgttttcatgaatattccacaataaataagacaaatttaaaaaataaaaaaaaagtatatagtaaggataaaattatcttggtctttttcaaactattaaatattttcatttgtaaatatcaaattttttcagggtttttataataaaaaagactgtgttatttaaattttctgaatttgaaattttctatgcttgtataccccttagttaaagttgggtgagcaatttttctcttttaaaaagtcaatctaacatagaacataacttaggtttaaatggtttctttattacttcattctggtcattttccagtagcaacgagtttcccaatttggaaagtgtcctgaaattggagagtattatacacaaaaacaatttctctttcacattcttttgtttttatccagcggtatcgctatcattagttataattatagttatgattatgattattatttaaaatgcatatttcattcttaagacaattttgaaggaacacaaagttttttgcaattttattactatgatgagagggttgtgaacattagcaatttggcaatttaagattgacgtttatgctccagtctttttttttgacttatttcgttttttcttcaaataaatgatactatattacttacaatgtacactttcctgacaatttgatctccttttattccttaacagaagtctctttaccagtagtaataatatgtgttatgtgatgagtacattaccataaactgaagagttatattaaaaatttgatatgatcattttatatatagtattgctatcaaaagcaaacagtattatttatataactttactgttattttcttgaaagtgtaatatgatttgccttcggtgataatactcagttttacacagtatgtaacaatggacgtatcttagagtcaactgtattctttcttctattatcatctgtctaaaaattaacttaagttgtgaattttaaaacacttgattttacattctttcttatacgtaggtggaaaaagttaagttacacaaaggtttcgtaaacatatatatacttatttatttattaataaattgtcaatagttgtattagtactgatgtcattccttataatacttaaaaatctagagttttccatggaccgaacctggttataaaaattaaaataggtgaaataacaaatataagtagattatttcaaagttagtaattaaacagtgacgaaactatccaaaactattaggtaggtgagcgtaaattcaagatttttatcagatagtattataaagaatgttaaaaaaaattaaatttacttttttaatgtttatatattcttggaaagtatcagagttttttggacatatatcattaattacaattaataaaagagataatgaatggtttctaatcatgtaatgaatctgaatggtacaaacatccgaagatacagtataactgaaaagaaactttaataattagtgacataggatataaaagaaaaagaaagaaatgatatagaattcttaactatgtgatatatgctgtcctagtgtcactgtggacgattttgcaaactctttagttgctaatgaggttcttgtttttgttgtttataatcataatataaatctgggcattttaggggaacatttatctttcaaaaggtcttcattcgttacataatatctctggaatctgatctataaattaaggttttaaccttgcaaacacatttacaaaatgaaaggtaaaaaaaattatatattggaccctatcatttgtattaacggatattacaagaaacagcaaaaaattcaacgctgaaaagaatcgacaactgcaggattcgaacctgcgcgggcaaagcccaaaagatttctaatcttacgccttaaccactcggccaagttgcctaccacctgtggcttttattctataataaaaaggtaacaccaccgagattacgtaagattctatttgaatttaaagtgctctattgtgttttaagaccaacgtgtccatttgccacctagtgtacagcgtgttcatatattgttgttactgtgccaccataacatattatgtttatgtacaccgtgttcattatatttctactacgccaccataacctattgtcctaaatgttctatgatcttcaattatattattgtaactaaaaataaagatatgaattactaattcattaatatatcaagttgaatagttgatcgagttccagaaaacatataaaaggacaacgttttctgtagatggaactatcttctgttattcctctcttacacataatttaaaaatattatatataaaacagaacaaccaacaaacaataaacgaacaaccaccgaacatcgaacgcagaatacaatatgcaaatagtgtaattatataagcttgatattgccgttaatatataggaccgtattaataattgcattaccgattgtatcaattattgtctcgattattaatagattatccgtttgatatttctagcgcttccccgaataatacaaaactctgaccacatcatattacaacaacttttcttgtggaatagaaaacttattaccatcaagattacataagattctgaatgaatctaaaactatctattgttttaatatgtcttactcatgttacaccattagatgctgtataataaaaaggttatttttaccaagatcacataagattctgagtgaatctagaattatctattgttttaataagtcacacatttattactaatgaccataagaattgtgccgtttatcattagtgcacctgaattagtataataaattttagggtttggattactaagctcattaatgtatcaatctgaataattgatcaagctccagaaaacatataaaaggacaacaacttccgaaaataaatccatcttctgtaactcctcttttatggatattttatataatatatataggagaaaaagaacaaatacatagaaaagctcactatagctgttaatatataagactatctagtaagtcctttaccatttgtaacaattattgtttcgattattaaaatatccgtttgatattattcgcacttcctaactaattaactaattaacagaactcatatattatttaccttatcataattttgttttcagaatagtttttataaatttatttaaattatcagagaattatttaatataatagttagacaatttgacattaaagtatcttgaaattttggtatcagtaggaattacaaacatcattaggttctagataccgtttttttctacatttaattcatatacatttatgatagcttcttgtttgtgtaaacctttctatttttttttcaatactctttctagaataatttttatttcatcaaatatttgaaaacaattttggtaaaagataaatatcttttacatatcatgctacatttttacattaaaaatatgcagaaagattaaaataaaataattcttatggaaatgacaataataggcacttatttgctaatagaaacaatattgagacttttaggtatataaactatttacttgtaaagataaaaaaaatacgattgagttaactatataggacaattattagaaaaattggtaaccatcagaaaattcgattaaaaataatcacaacacccaattttacatatgaaaaacctttgttagtttttaataatgtatttatttctgatttgcaattggtagagtagataatgtgctatcataatttgtgatacatattctgtgctttttataaaaataaatatttcactaaatgagaataaccttttatatatatatatatataggaggtggaggaaggaataagaaacaaattcaagataagtagtatttattgatgtaaataattatatattttttcatttgcttttgattttgataaatctggatgaaaactacataaaaagtattcttgcatagttattacacattgtgattatttattttgcctaataattatgtatttttttattatatacaataaaaattagcaaacattgattgttgtgatttttgcatatattacatgtttatataaaattattattttactttctattcagttgacaatatatttttctaagttatttaccaacttcaaaccacaacaatccgaaaaaattaaagcgttcttcctaccacctatatttttttaaaatatacatttctaatgcccaatttttgatttcaacataaaaaagaaaatgaacgtctttgtttgtataagcgttaaaaaaaaacttttcttttccgtttactgagaaatagatataggtaaatagtgaatatttgtttaaatatattttataggtgcgaattaccataaaaataaaataattacttaccccttttatagaaagttagatttttttgaacaaattatatcaaatatttaacgcatttaattatttaacaaattgcaataaagtaatttaaaaataagtagatatttggatcttatgggtaagatcgcaatatcaggatagcttatttatagaatcacttgtttaagagtttgtattagttgttgaatacaattgaataatttgaggataatgacgattatgagagatctcatttaacctagttttgtttagtgaaagacgcactagagggtgtattcttaatcatatccttgcttatatttatatcaagagttattttctaatatcatacaagaattatataataaataatggcaataataggttaaaaagatcatataaaagattgtattaaagttattatgtaatacgatgtagaggttaagtaaaattaattgtgttgaaattaaatttaataatttatccgtaacaacaattttgtttttatgttggtatctggttatttgtaaagtattttcgtttttttgtccttttttttagataagagagccatcccaaaacttaatattaaaaagagtttggaaaaataaacacatctgagcatcaaatatattatacgaagttatctcaagtcgtatactaaaatatagatattaattatatatataaacacttaaaaattatataattggtttattctaactattaaatagcttaatcctagttgtcattgatcttgtcctattattcaggttattatcgttctccctcttttaagtggaacctattagatagaatacgaatgttaatgccgataattacctctggtactctctctcaaaaatcaaaagtaagtctcttaaataagcttcttagtaatttgccatcaatattaatttgacgatcgttcgttcaaatacactcacggccttgggtcctaattttcagctattccaagtcctttgcctggacatttgacattacctgcggactacatatttcaagattttcaattagggcttcccacaatatatttacgcaaaaatagttgtatatattatatacaaacataattttatataaatttgacaactttttgttactatatactacttgatttattttgaaatatctttatataaatcaaatcttctttgacttgataatggaatagcttgtctgaaatttgcaatatcttctggatccaattcagcatagatgatttcttctccttcactagcttcagcgataatttcaccctttggattacatattaaagaatgaccgtaagcatgataagaactctctaaatttcttgctggggaacataatattgtataaatttgattatcaacagctctagaacgtgccaatagatgccaatgcataggacccgtaacagtattaaatgcactggggaaaaccatggcaaatgcattattcggttttcttgctgatatggtagtcaattcagggaatctcatatcataacagataccaataccaacgttaccgtaaggagtattaaccgtggtcaatttgttacctggggacaaagtttcactttctttaaaagttataccatttggaatatcaacatcaaataaatgtactttacggtgtatatcgattaaatcacctttactattaaaaattggtgatgtattatatattttatttgtttgaggatcgatttctgggatagacccaccaactaaaattataccatactttaaagcaatttttgataagaaatcaatagactgtgatttagctttattgtcaataacctctgcatattctctaaatttagttacagagtatggtgaattaaaacattccggtaatactacaatctttgtatcaggttgtttttgcatggccatttcaataaatttggctgctctatttaaattatccagcttatttggactagaaccattcaattgaatcaaagctactttaatcttttgcgataaaatctgtgacatattgtgacttagctatttttctttttatttcttttcgtctttttactcttcgttcttagtttagtaattttattctccctatagccatttaattccttctgaatagctattcaacctaacaataaatatctgttcttcaaacagtgaaagaacgtgaatttgtttataaatcattataatgtatgattcaaagagtctatttagtacaacttctatctaataaagtagttatcatgactaattccacttcacttttctcgataacaaaaaaagggtacaaaaaaaaaaaaagaaatcaagcagaaaagaaccatcaaattcatatctaagcacaataaatatatataatcattattttgttcatatgaaagcggtgaaaaagatgaaattagtacaaaattgtgatgatatccattgcaattagaacacgcaactcattcaaataaatagaatatcaaactcaatatacaatcgcctatcgtttttgttagatccgctaggatcttttaaagaatttttattttaaaaacagcaataataaaattccattccatttcagaatgttctatttgctgaaatagaatgttctataataaaatagatagaacaataagattttagcagacactaaacgataaattgttgagtaataactgttgagaggtcaccaaaagttgttgagtttgtttattaaacaccttactgttcgtagaggaaaatggcttaatgttaacatatataaagccaaggatttcatcatacattatttttatcttatttacaatctttgtgtattattacttctatgttgtatatagagaaagaaagtgaagaactttattataattttgtgtactaaatctgtttaatataatattgagaatgtttactatatatccaatgaataaaggcgctcattctcaacactattagaatattataaaatgtagatatgcttcaaatctaccgtgttaacaatgattgagagtcaatatgtattaatatatacatgtgcacatgtatatattattcatattgtagaattcgactatgcttttgacatggagttgtattcccgtcaccagttctatgcggattaaggaattccgataaaatagttcttcggtattatttccgctgttaaattcctttcaaaatactaattctctacagatattactaattttgattagtaatatgtgtaagagaattaaaaaaataaactgatcctgaaaaatatcccttaaggtgaaaaattaaaggtttatagattacgaggtaatacacacacacacacccatatatatatatataaagaaaaatacaatgattttaatagtttcaataatcttatacatttatatatacatatgtatacttgaacacacaaataaactctcaaataaaagtgttattattattgtattccatctaactgttgtgatttagttagactgcgaatcataacttattaaaaacttattgagtttacgtatcatttgtttaaacaaaatagcaaaaaagactacaccataatacatccctactaaaataacatggcaacaaacaatgtgtcaacagatgttcaaacaggtagaccaggtctttttcaaactatcccaccagaaatcatatatgaaattttgacttatcaatttaaagattatatgtcaaatgattatccaccaacatcagaaaagtttaatgaaaatttaagaaattttttaagaagtaatctaaccgtcaacaaaactttctatcatatatgtcgagttttactatacaaacattgcaactttactactgcaaaaagattccataatttattagaatctattgaacattgtcctgaattaagaaacattattcaaattgcagatttccaagaattgacctcgataggtctcggaagatcaaatgaaatgaataaatcgatccaaaatttaactaatgaaaccctactcagatttttgaaattaaccgaatctaacctaagagaatttttggcatgtgaaaacattcaggaggatttagatgaaaacattatttattggctcttaaaacctggtaaaaacctgagcatactagacttttgtgggtgttcgggtgataatttgacaaggagttttattaacgcattaaacaagttatatccacctgaactaattccaaataatatgaatggttctaattctaatattattattccagaacctattgcgtacaattcacaaataacttgtttaggattaaatgattgtactgatttaccaaaacctgttttaggtaaattattaaagttgtttcccgatttacaaaaagtggatttagcacatacatctatcgatggtcaaattttgatgcagtatttaccacatttaaaaaatttgactcatttgtcctttgcatcatgttcacaactaacttcaagatccattttagaatttttttcacatcaccccgctgtcaccgatgaaaataatgcttccactttagaatggttaaatttaagtgatatttctcattctgctttgtggaatgaggttcatacaatgtttttattaaaaaaactttgtcaatatggtcataataaaactttacagtatttgaaccttgatggtttaccattgcatcaagtaacgatggcccactctatatctggatccaatactccaacatcatctcaatcgactgtctccataacatcttataattatcgtcatagtcgtagagaaacaattttttctacggttgtaaaaactaaatattactataaatgtgctgatgcattaatattcataaaattaaattttcctaagttgaaaagtttaagtattagaggaaacaatatatctattaataaattagtagaatttttatccccaatcaaacatatagatgagtaccctaatttaactgaattatctaaacaaccacaacaaaagttaaaatttatcaatctatcaagaaattcatacattacaaaatggactattcaagatcccaacttattaacatgttctgattcattgtgtgcaattgaagtcaattttgaaacttggcaacaaattgaaaagtcaaataatgacaatgaaattatttcaatgaaatatgattataaatcgcagaagaataaagtggttaaatggaagtgctttttggatgtatcttatggtagaagacattggatttatagatgtgatccatacctgaataaagatgatattgaaaagaagagtcaagtagggacacgctttgattcaagtggtcataagattattgagattgttaaacaaccagattttttaaaatttgcacaaaccaaaatatcattaagttgtggtttagttataaaaagttctattcgtagaaaagaatgctataaagattataagccaccaatttcccaatttttaacaagaaatggtggtattacatttggtaatataacaccacctattagaagacctacattaccaccaggtgggtggaggtttttacaagatgatgatgattatgatgacgaggaggagatagaaagagataattttgaaggtaataataatagaagatttggaataagaccgactgaaaacagaaatccatctttacattcacatatacatcataatgagagtcatgatacaccaactggtttatattgggatagatcaatgcatgatttacactctttttctctacagaataataatagcgataacattgccaataatgccaatgatatccctactatacagccaatacaaattgaaaatgatgctgagtatctgaataatcctgagttacaaagaagaaggtcacaactacagttattaagaatacatcatcggaattctaatcgcatgttaaagggtaataatttgcataacattcacaatagtaactcaaatatacttaaacagaataaagccaacagtatgcttaaaacatttttgaaaccatctaacgatggatcttctaataacatagactgtttaagcaaccagccactttctaagaagagtgttgacacttcagaggttgcaaaattatctaaaccaaaaatcgattattataaacaccctgaacaatttatctatgattcaaacgattcagtgacaaccaagagatatcagattcattttgaggtcgtcgatgagtataaaacatttggttgtgtagaaagaggtatgtatcgttattatagtctaaagacttaatgaatttagtgactaagtgaatgtcgggtaagtaaacaaataagtaaatactcaactaagcaaatatttatatattcatattcaatattattgccatttgatttgaagtatgaagttgacatccggtccctcatcacaccatactattaactaccttgcaagaaaacacaggaatagctattatctttaattacaattggtaatgctaattttgtgatcatttcgattgaacctctttaatcttatctccgtctaacaacttctgcttctgtcccaatttggtccagactgacgcgtcttctattgttcgtgcttgtttacattcgacgggtttgggaaatttgcaaaccaaaaggtcctcgaaaaaataaacaaagaaatttcattctgaaagaaatatctgaatagaatgaaagaagagatgggaaattagtgaatgttagatggcatattatagggcttcgcttcaaactttaatttcttaccataaagttagtcatttcaagaagtccacttgagtaggaattgtcaatgactaaaaatattttatttaatagtgaattctatatttatactattgacattgcatataaaattctccagcttattttttaatataagtagaagaaaaaagaacaatacatcaatttttctgatagtcattgcattattaccttatcatatttatacaaactaaattacattcaatcaatgaaatattcgtttatttaattcaaaacactcatacatatatacattaattattctccgttcgcttaatcttaaccattaatattaatactatcattactttcaaacaaacaatccactcatttttattttaaattttagatgacctccaactcttcttcatattcttatagttctaaaccatatttttcagaggatgattctgctgaattttcgcgaaatattattaataatagcaatacgattcaaaatccctataggacttctttatttatcgaagaatcccctgattcaaatagacgaacgataaatggtgcccaattaaatattgtaaatcgcacaagtacgcatagttttatggtcttcattgatgactctgtctatggaaatataccatcttcatcagcatcattatggtcagaggttaattccagtagtagcaatgccaatatagctagccaaaacaacaaatcagataaaccttccgaaaacatcacttttagggtgacaaatccaacgaatacgcatgataacgtttcctttgttaacagcaattcctcaaactctgcatctcctactgttaatacgaattcatcatattcttcaaatattcatgcatcaaatttcagtcaaatacctactattaataaagagttgccagttataccgagacaaaagaaagatggtcttttattacgacgaaaagtcacaccagaatcaatgaatacaggagatacagaatatttcgaaacaaatgagttcataacatctactaataatattaatgaagatgatgttcaattattttcaacaagtacaaaaaatgtagcttttaatgtcacaaatgatagaaataatacttatagcataaatgaaaattcaaccgattcaattgatactcaaaatacagaaattttagatacccgtataagaaactctcattcacttcttccaactattcgtgatagtgtaagaactttgtctactattgtgctcactcaaaatcgtgattcatcaataactactaaaggaaataaaaaaatattaaacccaattaatcaaaatgatgaagtaaatggtatctcaatgcaagaggaaacatcattaaaaggacaaacttcaactcaaaatagaacccctccattcatcaccaagacctcttcaaacctctcaaattatatttcttcaaggaataatcctcaaataaatatttcatctacagaagtcaatcaaataagtagtatggaaccctcatattcttctatattccagtatgatgattataatgatactattgaacccgatgttgagcaagcagttaaacttttgaaaaaaagaagttaaaactagtacaccaaaggtcaattatgttcactctaaaagggattcaagtgacattttcataccagagaataaaaagggaggagaagaggaagaagaagaactaacagataaggataatatatcaattaattccagaagttcaagtattaagttcattccacacgaattaaaaatacctagtaggctgtctatttcacaaccacaaacaccgataattgctgcttctgaatcacatgtaccaagatcaccatctttaattaataaatttttagtgacctcttcatctaagagcaaaggatcacctacattcccgccgtataatttacataaacgtaatgtatcattaacaaatcatgctactgtaactcctttatatggctcaatttcctttaatacaaaaattccatcaactagttctgtccattcaacaactataccaaaagtgcaagtcttacaaagtgtatcgggaccaagccgatggaaaccaagtcctaaaactgagaaccacatagtctctatgctaggttctaatgaatttaaaaacccaattaaaaaattatcatttcatgaaaacatgagagacagcttacaagaatccacttccatacaacatcataatataaccaatatagaatcattgcaacgtttagaatcagataatattatccatgaaatgtcaaccttgagaaatgatttatctaaaaatttcactactataagtcctcaacagacaaatattatactgtctttgcctactagagaaaatacattctataatgcaactaaggaaatacccgaaaacacaacggtgggttacaataatgatgcagaagatataaatactgataaaaccaataaccttcttaataatgacactaccgagtgtccaatatatattcaacatatagatttaccatcaattcattcatttgattcacaaagttataaattttgggagatttattcaattcaacgtatgatatcgttacttattgtttgctttatttttccacccttgttcttcatgatatatatgggatctacctgtggtatagatgactatagattgatgaaattaatattaaataaagaacatcgtattggcttgtttcgtggattcctttgggacatcgatttgaattgggtacgtactttatcattgttattaggatgtgttgagttaataattatacttgcatctgttggaattgggtttggtgtgggacttacaagataattcacttactcaaagttagtatatatatatatatatatgtgtgtgtgtgtgtatgtttgtgtatttgtgtgtctctttctctgcaaataaaatttctataaagatacacgcaatatatgtcaataaacagagtaaatgaaagaggtagagaaggattgaaagagagagacaaatagaacaaatcataataaaacacgtaacatattcattacttataatatattggatcgttaactatagaaaattttacataatagtatgatatataatgtatggaaaagaaaagtgaaaaatgacgtgagatataatgatctatcaacaggttcaagcgaggattttttcttcaacaatcttgaacaaagtcttgatatcggcagagaattttctaataccttctgccaatttttcagtagccatagcatcttcattcaaatcgaatctgaaagcagcttcgtcattgacataagagatcttttcatcaccatccttcttagcttgttcaacagttagtaaagttgggactggctcgttagattctaataattcatttaataaacctggagaaatagttaagtaatcgacaccagctaaggccttgatttcaccagtatttctgaaggaggcacccataacaatggtgttataaccgtgttttttgtagtagttgtaaattcttctaacggacttgacacctggatcagtttctggagtgtaagtttcaccagtcttggctttgaaccaatccataattctaccaacgaatggagagattagagtgacattagcctcggcacaagcgacagcttgaacgaaggagaataataaagttaagttacagtggacaccatactcagcttccaattctctggcagcttggataccttcccaagtggaagcaatcttaattagaactctttccctagagataccgacttcttcgtacaaattgatgatctcaagggctttcttgatagtggcatccttgtcaaaggaaagtctagcatccacctcggtggagactctacctggaacgattttcaatatctctttaccgaattcaactaatagtctatcaacggcaatttcaactttttcttccgtggtatttccatgttctttaccgtattcaacagcattgtcaattaatttggcataggtatcgattttagctgcagctaagatcaaagatggattagtggtagcatcttgtggggtgaatttagcaatggattcgaaatcaccagtgtctgcaaccacaacagtaccagaagcttttaattgatctaaggaagaaccaatcttttgtttcttttgagctggagccatattgtttatttatttacttatttatttatttattttaatctaatgtagtttttgtgtatatatatatatctcaattaagttataaaagagtatgtaatataggaatagtcaggacataaagatcaagtagcgagtacgacaagaaatttggataaagtatatatatatatgtgtgtgtgtatacgtgtatagaaatgagacaattggagaaagggcaaatagaagagtaaatttactgaatggtgtgaacaaaaaagatctattaatgaacaagagaaaatgctctattactatcaaaaagggaataatctttatgatgaatatgagataataaaccaccaccagcaccaccacaatactagcattattgttaaaataataatagtgattagcaaaatgaacccgattaaagaaagagtcggtgttacaaatgataatagtaataataataataatagtagtagtattagtagttcaagcgaaaaaaataataagaaaggaagtaaaagaaaaaaggacatggaaaattagtcagacatttttcgtattttatttttccattcattatgaacagagaaacattaagcaaatatcacttttttctttggttagacagttcagtcgagtcgagaaaatattactaaggcaaaatgcctcgagaacggaattttttacaaaaaaaaaaaaacaaagaaaatattaacattgggaaatcctcaaagaattattttggagaacaaaaacaacacaccaaccgggattatattccccaaccgacatacaattagggttggatgagcatcgtttcaaaattttaccattataagttagggtaatggcaaacaactatcttataagaaaattgtcaatacgaaaataagatgaatgaaaaatattacgtaaatgtgaaagctttcatttctaggaatcgccaaatgggtggtatgagtaaaataaggttttaatcaaaaagaaaaagaagatatttttgcttaaaattttccttctggaggtgggatctttcttcttttcttgcgtgattcgaaactaatggcggacacaagaatggggagcaagaggaagaagaaggaatctctttttatttttgtttttatcttctttttttttttttcttttttcgttttcatttgttttaatatttttctaatttttgataaaaaaagtgcattgctttctcgaaaatgaaatttttttaagattaaaaaaaaaaaaaagaaaagaagaagaagaaaaaaaggggagtaatactattggaaagcatacgtttattttgttttattctatttatttacttctttctattaaatatataattgatggtaaaataatatatcacttatcaataagtttcacatatccgaacggacaaccaatgttctagccaaactattcaatataatcatgatgtgttggatattggtagcgaagtttttataatatatataaaaattaaggatcacgtcttgtcaagtccaagggatgaagttaacaacaaacttttttgaaaataatatagtgaacgataacattctatccttattaaccaatttactgatatttgaatatttcatagccagtatactaataaaaatgtcccttgttgatagtaatttgtaaatgggaaccttgtactgaatgcttcttctatatcttatcaaaccacaataattataaataaattaacagagaaagagttccccttaaaggatccaattactaataggtttattcattaaaaactctatataaagtttaaatacaaataaataaataaataaataagtatggtatatgcgatattatgataagtatcattattgtcaattcaattgactaaagaataatataaatacacacctcaatttaataaaattaaaagagatgaaaaaaaacaacaacaataaaggaatagattagtactatgacacatattatgatttttgattttaaaaatcaaaaaaaaaaaaaacatttaaggaataaaaagaatttataagacacacacacataaataaaaaaaaagataaaaaaataaaaaataaaaataaaatggaataaaaatgaatcgaattgaattaaatgaaatgaaatgagatgaaatgagttatgtgaattaaatttaaaattttattatttattatttatttttccatattcctaaacttaattgttttctggtcttaactttctaacttctttaccgaccttccagatttccatgtttctgatagtttctaattcagcttccaatttttctctgtagtctggttgagagttgaattctaaggatctcttggtttcgttaccattcttagtagaagcatataggtcttggaagactggtttcaaagtatccttgaagattgggtaccagtctaaagcacctcttctagcagtagtggaacaagcatcgtacatgtagtccataccgtacttaccgatcaatgggtacaaggattgagtagcttcttcaacggtttcattgaaagcttcagatggagagtgaccgttttctcttaagacttcgtattgggctaagaacataccgtggataccacccatcaaacaacctctttcaccgtacaagtcggagttgacttccttttcgaaggtggtttggtacacgtaaccagaaccgatagcgacagctaaagcttgagacttttcgtgggctttaccagtaacatcgttccagacggcgtaagaagagttaataccacgaccttccttgaataaagatctaacagttctaccagaaccctttggagcaactaagataacatccatgtcctttggtgggacaacatgagttagatcagagaacactggagagaaaccgtgggagaagtataaagtttggttcttgtttaataatggtttgatggtggaccaggtttcagattgagcagcgtctgataataagttcataacataggtacctttcttaatagcttcttcaacttcgaataagttttcacctggaacccaaccatcttcaatggcagccttccaagaagcaccgttcttacgaacaccaatgatgacatttaaaccgttgtctcttaagttcaaaccttgaccgtaaccttgagaaccgtaaccaatcaaggcgaaagtatcgtttttgaagtagtccaataatttttctcttggccagtcagctctttcataaacagtttcaacggtaccaccgaagttaatttgcttgataccacgagtaggaatgattggcttaacaaatctagcagttggcttagtagcaataaccttagtagctaaagcaaaagttctcttggaagtgataacacgagagttagcaatcaatctagcagcttgagttctcaacattatgtatgtatatatatatatatatgtgtgtgtgtgatacgtgtatttatatgtacaccaaagaatttgtagagttttggggatgtatatctatattagagggaaggcaagaaaagaaggggaaaagcaaaaaaataaaaagctttgtaacaaggacaaagtcgataagtaatttactttgtaaacattcacgattacatatacatatatatatacgtgtgtgtgtatttatatatatttctatttctaaaagtttatcgttaatttttcatcaaaaaaaaaaaaaaattcaggaaaaaataaaaaaaaaattacacaaaatagacaaaggagaatggactgagattattttgtgagtcaccaccacacatcaataataagagaaacgataataatgaaaataatataataacaaaacaaaatagtgattgatagtagttaatagtagtaatagtagtagaatcaaaagaaagaaagaaagaacgacaaaaaagaaaagcagtatcataataatggtgaattttcctacgctttttttttctttagtccgtttccgcttcattaaaccatttcttttctgcgtcgtgaaatagaacaaaaaaccacattccgttaattcggatttttcttttttggcatccaacttacaaattccgcttattttattgtaaaaaaaaaataaaataaaaacaaaaaattgactccctcctgcctccaaacaccccggccccccttcaattttttgtcaacttttacatttcttcattttaccgttcttactttcgtcacatgagataccctaggtgtaataaaaacaaaaagagaaaaagaaaaaacaaattgagtaactacctcctttctctcctcccaaccctctatttttctgttcagtcttttttgtttttcaaggcaatgacctaactagctaattattttctaaaaaaaaaaacaaatagatatttcatattttagttattttgtttcagtccgctaggatcaccttccaggatcttgaatcttggtaatacaaggcggggcagaaggtatgctaatgaatcggagcggtaccggccacttttcaatggattacaaaaacaaacaaacaaacaaataaataaataaataaataaagttctaccgattctctctgttcacaaaactatttcatgcgttctattaacttaaaaagagaaagtcttaatttaaagtctttatttttatctttatttttaattttttttttttggaaagaaactggtatagtcctacaataatatagaaaaagaaaaattatcgtctgagtcatatcctccactgcatattctcaataaaactttgataatcaccttttttttatttaagaattgacagataaatcgggtcaagaattacgatccttagaactttattctctagtgaagatgaaaaagaagtcccatttctaggtatgacacaccattctagatacttgctaatatgaaagaaaaaatatacatgtatgtatatgcatatgtatgtatgtaaatattgctaggaaatctgttaaaccatgtttggcaaagaaaaaaaaataaaaaaaatgtgatcactggaataataatcagccctgtgtgttttttaggggttgttatgttcttacatttgattcacggaagttttttcatgttttatttatttatttatttatttatttatttatttatttatttatttatttattttccttctctaaaacgtaaaataaacaaaagacaaaaaggggacgagagaagaagggaacattagaatgtgaatttttattcttgctttttgtttttagtgttttgctttttttgctctcattgtatcatttgtattgttgttgcatattaaatctacaatttatatataacaaccttatctgtagagattctgtatatattacgttcatgtttattttttttctttgcttttcttcttttttttttcgattattaaatatcatacaggtgaattaaagaaacataagttaaaataaaatataaagtgaaataaatccatctgaatataattggagggaaggaaaaaggaaaaaaaaaagaaaataatagcatacaaagaaactacaaacaaatcaaaacaaatcaaaacatatacatatacatatacacatacatatattaaacatgtctctttgtttaggtattactaaaactatagctatatcatcacttgggttatatgcaggtgtattgtccgcgtccactatattatcattcaataaacacacatcgataattttatctaacctagacattattaataaagcacaaataaaacaaattatcaataagattttccagtttggcaacgttatcggtggcctatccactacattttttggtttaagttattttggcgcaccggtccattggaaacatccctaccttctatatggaatgctgattgctccaatatcaaatctttatttgtattatttaaaaggatcaattgaacatgaattgagagtacaatcaattgacaataaaaaggatctaactagtactgatcccaaacccattcaaatcaccgaagacaacgattctaacacatcccctacttcatccacaaatgaatctattgtggatttgggccaaaatggatcacaatcaccatctactgaatctaatgttgaggtattagaaagaacaagatcgttttgtaattcaattgggacaggactattattgactaccacaatatcggttgtcggacttgtgcaatccgtcatgggtgtctatggggaaggtaatttcacctagagaatatccattcccttctatctatcttctaccattctttccttctctactttttttctttttattttattttatttcatcttattttttttttcaattctttatgaaatactattctttaattcttttctttttttctgatttgtaaatatcatcaacaacatcataatatatatatatatatatatatattaatacatgggccaacaatgtcattttgtttaatttgctgatttattaaaaagttaaatgctataatagccataccttcaaaaaaaaaaaaaaacaaaaaaaaaaaaacggggatttagttttttgtttctccatttctcaagacataaagaaaaaattactttttcctttgtttttcttttgtttcctttttttttgtttttttgttgttgttttggcgtctcttttttctcgaaggcttttaaacaattttgctcttttgattttttctccttattttttttttttctttgtttgtttgtttgtttattatttctaaatttaaatttatcagaaaacaaaatcaaaaaaaaaataaaataagataaaatgaaatgaatattcaaatagtaatggtatgtacttattggttaaggtaacactacttgatctgcagtctttcctattttcttcccccagtattcttgccttaaataattaagtaactatacatatacatacatttacacacacacaaacacatatatatattgttcagttcaacgtagtaagaaaaaaaaaatcaagcaaggttgtgttcggtaatatcagatattttattggaagaacaaaatataagtaatcaaataaaaataaacagaaagttattatgaaacattttagaagaaaatctggggtatccaaccacagtggtagcagtgatgaaaaacgccattcaaaagtagaagtgacaaaggaagatatggcaagattaaaagtccgtacagcatcagtggcagatccaatcttggaagctgtgcaagaagcacagcctttcgaacaagctgcagacacattccatgataacatgaatagacagtcctatttctcagtaggtgaagacggtcaacagcaacttctaagagacgtcttcggccaacccatcaccatacctgacgtatctaatccaactagatctcgtgatgaaagacctttggatactatcagatccttcgaatacgctgtctccggcgacccgacctgggctcagcagctagagacaccacaatatgggttccatgtaagaccagaatttattaattattttagcactaatatcaataatattcaaccaatgtacgatgaacaaggtaatatcattcagactcaacaacaggcacctgtaatgatgatgggtgaacaacctgtgtatcaacctcctgttcataatgatttagagaatgggaagaagaaaaagaaaagaaacttctttggtagaaagaagaaataaaataatttaattcaaataaaattcatataaatctaataaatatatatatatatatatatatatatatttatcatgtatactatgtttttctctttatcttttttttttctttttctttttcttttttttgttttgacttttatttaattatttacctctaactagtcgttagatccaagtttcttatcaattttatccaataattcaatccatttattttgttgtgctattaaaatttcaatcttattgtcccacttttgcaaccttagattgttttcaatcatatcatcgtagatggaactataactttctaatcttgttattatatgatccatatatggagaatatttattgattttttcaaatgattcaactatatttatatcatctttgtctctattatctcgaatatttatgtttatgtttttattacccccttcttctttattcaattgatttttaatgaattttaagtgagcatataatttgtttatcctcgatataatgtttaaagttgggtcattattcaaatcggtgtctggatcattgtcaaatccaatggactcctctaaaaccgataatctttgttctagctttgtcaatctttgcatagtgacataatcgaataaatcactgttttccctaatttctgttgttgtatctatataatcattcatattatcaatctccggactattatcatgatcatttttaacattatgatatacatcgtggatctttttatataatgttactatttgattatatcttcttaaagaagattctgatttatctcctagatccaaagataataattccctctctatactatctaatttaaattttatatcattagaagggttaatatttttttctttatttttcaaacatctcatctctttaattttattagataccccatttttactttcataaacaataatatcaccaccttcgacctcaccaccatcgtcgtatccacatatatcttcttcagttaattcaatctgcatttttcaaagtattataataataaaattaataacagtttccatcatctaacaataatcttattaaatatcattatctgtgttgttcccatacattttcaaaggtttttggcacaccaataatggcttcaatggtttatatattcatcccacaactttcccacacacacagacacacaaactctctttctccttttctctttctctctttctttctttatcgacaaaagtaataggtttttgaacatttgattctttaatcacaggattacggaacctagagaatccgccatcggaattgctattttccgcatctgtaacattcttttcacattcttcttatgcgctattttattttttttttttttgaaacatcctaaaaaaaaaaagcgaactggtaaaaggaaatgaagtctagagaaatttgaattaaacatctagattgactaattgggagttaataatatgaacatatacaaatatatatatacatgtgtgtttgtgttttgatgtaaaattttcatgtatcaattgagttaataacaaagatatcgaaaaataatctgaaaagcacgttctctatttgtctatctatctatttgtatatatatatatatgaatgaataaggcacaattaattaataatattttcttatctattaagaataacaatgaacaatcgctattgaagaaagggtcccaaattttgacatattcattaaaagacaatatatgtgtttctgatacaaatgaaaatacaacatgtaattcatttatgttatctaattataaatcaccatttaatgccaccatatatgaaattctttccaaacaaactaatttgaaatatattggtaagacaaggttggatgaatttgctatgggatctatgggtattaatgatcctttgaaattaaatctaaatgatgtattgaatcccttgtttcctgactgcgtacctggtggatcatcatctggtgctgctgctagtgtatcatctaatatggtagattttgctattggaactgatacaggtggtagcatcagattacctgcagcatggtgtagtactatgggctttaagccttcttatggtaaaatatcaaggtatggtgttatagacatggcacaatctttggatacagtaggtatactttcaaatgatatcaatattattaaatatatattccggctattggataaatacgacccaaaagatactacatcgttaccagagaaatttagatcgaaaagtggtcaagatccaaagatgaatacaagagaatggaaaattggtatcccaaaagaaatttttattgatttatgtgatcctgaggtttggtctcactttaaaattatattggcaaatttgtttaaatctgttccacaggtgtcattatatccggtatccattccatcatggaaattgtcgttacccatatattatactctgtgtccctcagaagtggcatctaatatggctaggtatgatgggattaggtatggatcaagagaaagtgacgattttgaaacacaaaatcaaggtggagacacggaaaatgatataatcctatttgcaagttctagatctaaacatttgggtaaagaagtgaaaaggaggattgtattgggtaattataccctgtcatcagattcgtataaaaataattacatgaaagcgcaaaagttaagaatgagattaattgatgaatttaatacaattttccgattgcctaatatattattgtctaatcaagaatatgaaaatgatgaaaaagatggagtagatttcttattggtacctactaatttaactaaacctccaaaattagtagacattttgaataataagaaccaaggtaaagagaacccgattatggattatataaatgatttttttacagtacccatgtctcttgcagggctaccaactatatcgatcccaatgtgtaaaaaatcatcattaggtttacagatagtgggacagtacggcgatgattataatctattagacttttcaaaacacattataataaattctgatgttctcataactatataagatcataattgcttcattttgttctttctttttcttcacgtataaatataagggtaatgaaattgcatatatgttatatatatatatattctatatcatattatttgtcttttttactagtgttatttttatacaggcaaaactgatactcctgcaattctgtcgacaattggtgccactgcaggatgagataagataggaccaatgataggtaatgaccttaaaaactggaccactataccgaaaaagtcaccaaataaaccaaagatccccacagtttccacaataaatccaataaaagtccatttcgcaagaatcagaagaattccagaaataaaacataaagaaccacgtctctttgttggtctagtgaaaaaaatagtagttttatgtaatccgataattaacaccacaccgatgagaaatagaatattgcctagagctagtaacgctctatcaaagaaggtgagaataccaaaaaaaaagaaaccaactccaccaaaagtgaatgcaacaccaaattctacattaaatataaattatcatgtacagataccacatatatgcatataaaattagaaaagcaattgataatttgttagtaaaagaaaatattgtacataaagaaattctcttttatgacataaaaaaatgatgataatattaacatactttgagcttcacttagccacattagttgtttgtttttagttaatattttttatgtatgtattcctttatctattaatacaattttgaagtaattttacttattttgaattaagttacttattcaaaactagaatccgagttcgattcaatattttcttaaaaggtctctctagtacagttctctgttcttaaatgcagaatgaaacttcctggtaacaacagaaaaccttacagtattaattgatagcttataacgaatgtttttttatgtatacaacacgttgacagttgtttagagtttgccttgaacattttaatcttacgtttagaattttgtttctattttttttttttttagtgttgacttttagaacttttgtaggttttcgatttgatggaagagcacagataaaagaatttgtaaaagaatatctagaggttgatattgagagagttcgttaattagtagctgatacatgatagcaaagtgtttcgtggagggtgggtagaattggtataaatgattctatttgtaaataagtcatttctatttatttctatttgattgataatacttatttttaataaatatatatagcaggaaggaaacaatttataataaaagattgaaaaaggattagtattatcttctttttaatgaaatgaaatcttttattagatcacatagacattccaattcagtagaaaatgatcatagtatatcgaaacatacttctgttactttcacgaatacttcggttacaaattttcaagataatttggatttttctaacactcccaagaaaataagctcacaagaatttaataccccaccaccttcggtttataatttacatcgctcatcaccatcaaagcactctcccacttttgaatcttttcataaattggctaacaaaacacataaattgtttaagaaaaattctatttctaatttacgttctagtctcgatttaactagtaatactaatgctagtagcaaaattaacaacgaattatttaaccacaaaagtaaaaatcggatatccttatcctcactttcgggttctgacaaatatagcaacgatgttgataatataccagtaattaaaggtacaatagtacattcgtggggatcttccaacaacagacctagtgttgataataataacaatctcagcatgactatctcgaacaacagtaagaatgtgaagtttaatgataccagctcagaagatcatgttatatatttaaatgcgtctaataatgataacaatgaatcgtcgataaaggatagtagtaatgttggaaatctaagtccacctgtaaaaatatcaggaagaccatctattatttctgatgaaaccgaaaaaaattattgtaataaagatcaattgaacgttaagtttatacagtattctacttgtaagaaatcagatgacttaagagatgtaccaaatgaattaaatattccaaaagtgcgatcagtccatgtttcaaaagaacaaaaatataaaaatagaaaagctcgaattcattcaaatgaggatttgttatctttacaaactgttattaaagatgatagaggatataatgatagattaactcaaaagtcagatatctcattggttaaaaacgattcggcgattccaagtattataattcaaaaaccaataatatcagataagtcaatagtgctagaggataacagagctaatgatagagaaagcgaaagtgaggaagaaaatgaaagtgatgtttcagaattttcttttgaatattctcgtcttaatggaagaacatcatctgtaaaatattattctaaaccagaggatgaggaagcagcaataaataacgggacagtatatattaatgatatctatgaggatgaaaattttgatgaagatatgaattatgatgatggagatgatatggacgatataaattacagtttctatgacttgactgacaataatacagatcacattggactaaataacaattacgaaagtaataataatgtagaggttcctaacaaaaaatcagtaaccttgaaaaaacccataacaaagtatagtgacttatttgatgaaacttccagtgataatgatgaatatatggatgatataacttttaaagacgagaaatacataaataatatatccatcatacaaccagttattgaagcaggtcataaagtgaatagctataatgatttatttgatatatctgatagtgatgatattgaaaatgataatagatacaatggtgatacagtaatgaaagacaataatgaatctaggaacacacaacaaagtaatggctgtattaatctatttaatggtatctctaaaaatgattatgtaaatagggatgataatcctctaatgggctatgaatcgataaagaataattattttcttagcaaaaatgataatgttgaacaaatatgtgttaattcaaaaaaaacaaaagtaaataatatgcaagccgaatcaataccaacaagtaatcaccagcttcggtcatttgatgatttatttcatatttctgatgaagaagagaaaggaaatgctgaaatgccaaatgagggtaatgacaaaataataactgaatcgtcgcagagcggctcatgttgtgttatagaagatcaagaaaaaacacttatgatcaacagtgatacaccattaatactagaagattctaagattctaaaaagttttgaacctaaagagaatactggtaaaaatattaccaaatatagtgatctatttgatctatcagatgatgatgatgcgatagattctgcggaagatgttgcattttatgtaaatcaagaatcattgttaaattccccaattaattctatttccgatgatcgtgaaatgagaacttatttgtccaatgccagtaatttatgggatagaaaccaaactccaaaattacctttatcgataactactaatattaattctcaattattaagtgttaaaccaataaagaaaccatttgatagatcttacaaaagttcctctgtactagcagatgattataatgacgaaactgataccgaaaatgaatcattaactcctctaacatctcatttagatataccatcacctcttaactcaagacagtttactccaattaagaacatcctgttatcccctattgtaagcaaaagcaaaaatacttctgttcaggcatccggtaatatagtgtcttcacagcctttaccacctacagctagatctaacgtactaaaatatcatgacttaaattctaacttggattcggaagtcccaggattgacaagtacgttatattttattgatgaagccgaagaagatgaatataataataataacaaggacaaacatgattttgaagaggatggttatacttatgacttggatgaaattaataaagttccagaagattttgagttctcagaagaggaagtcgctagaagtagatcaagacatttgcggactacttttggttcacctttaagtttccgccgaattcatagttattattcaaaaccaataggtgtacctcgaggaaacacaccattgaataatagaatagaaattaacaataagactgttaccttttttaatcgaaattggtccaataatgctacgaataatcttagtgttctgaattacgggagtgttgaaagtagaacacctccttcgaggtcacctttaacatctccgtcaaagatggataaaaataactcaaaaaatttttctaaactatcccctataaatgcgattaacagtcagtactctttaagtcccattcaagaatcatcgtcagtagcaaattcaccagaaagaatatagaatcaactacttgataataaagtaggtagattaagccaaaattgaattttcataagacgtttaatacattatatagcatatttctgatatacatatatgttaattgtgttgtaataatattattttaaatattcatttaaactatctaacaattatatttgtattttataagaaatggcaagtttgtttattaaattgttttgtgtaaactttattacttgtaaaacgttaagaaaacttcatatgagaatatagatatataagaatgattataaaattattgattattatagaaaatttttcattaacttaaaggttagttttggacgatggactaacacctgctaattcaaagatagtctgttttgccttcatagcagtattttcgcacatttctaataagtcagtgtaatgttctatttgttcttttcttgtattcgagttatatttgatttttggagagcttttatagttttttgccagtaatttagctgagttctctttgtgattatttgttaacatgttttcatggctattgttaggtgtattgcgatgtctgtatttgtctttaatggtataattattattatgcatgtcactgtcatcatcaagaataattacatcaactattcgaccatccttttgtctttctctaaccaccctataggaatcgttaaaaatatttgccttattattagaggaattagagtctatattatgggcaataatatcgttatttgagatttctgttgcaactgttgtttgcgttagctgtgagattttagaaaattgtgaattaacactagatgattgattacttcctggatttgaaagttgtctccttggcgataatagattataggatttttgtttcttagaaacttcgtctgtgtggatattcggtataaggttttcgtttttgataggtgttaaaaaggattgaaaagaggataaaggttttataggagattgaaacttatgtcctgatacagaattattattagaattaggtgagttgaagccaatggtctcaggtgaaattattatattacttactaattgattattttgtaccgctttcttatccttttttccagttgattctcttaatcttaaagaagatcttcttggagctgttggttctttttcaggtggggttgaggtggcattaaatggtaatgaaggggtaggtggaagattctctacatctagaaatttttgtggagttatgaaatccatactatgaatacttctacttcttttatgggaatgaccaattctgttattgggagataagtgtgatgctagtaatttttgtcttcttttttcaacttgtgtattatcttgtggggtcctgtgataatcattatctgtatattggttttgatgttgaatgttggaattactattgttattatgattatttttttgatagctttgtttcacaggtgtcttcggctgttgggacaataatggaggaaatttaaatgatgtatccaattgtccataacttcttgagttattaataggagaaactatcgctttattctgatagagtggttcaaattggtcaaaaaattttaacgagctattagtgttacttgttgatgtaaaagattgtaatgtactgtttggtgtactcagtaatatatcatctagatctggtataatgatcgatttagacggtgttgctaagatggctaatgattcacttgtatagtcatctgtattaacagatttattattgtttttattgggtatatgttcattaattggagataaagtgttggtaggtgaattatattcgtcaatcattttacttaatcttgaatggtcaggaagagaatatttacagatcttttcagaagattgttgatttagtagtacattatcaatatgttgtgtattttttgatggtggtagtagattagattttgttgttttttcctttaattgatggtttgtatcattatttttaagagtcctttgagtttgagggatagaaggaagaggaggaagaattttaggatcaattttatttgatttttctttatgatttatggtgttgtctttttgcttttttaaatttctgagttgacgtttaagatttacatttgcttcaccatcaatccccaacaaactatcgggatctattgtattggcatcaaaagatatattatatgtcatagacggtattgaactagttgatactagagaatcacttaatatttcacttgacaatgtatctccctcttctttgttgatacttgacaaagataaagaattatcgtcttcttcattatagacactatatgattcaccatcatagattaaactatttctttttttatgttggttttttggtgacaagaatggtggtaaagatatctctaatggaattggtacattatgtttattaattggtgaatcagaagctaaatataaactagttgacttaattggagtttttaatgtcggattgctgttattgaatgatggataatttagaggagaaacttgacttatttgagaatcattgaatttagaattagtgaggttgccaacggagaatgaagaatcatttggatcattaaaagaattaaattcacttagagtttgagagataatggactgtaaggactttgatctgtgatgacctttatttgaatttgatatgttattgcttattattggattatggtttagagacgtttcatccattgatttcgtcttttgatgcgatttattgtggcttctagtatgatgaaaattccatatctcttctggtacattaaccatcacttttgattgtaaatctactagatgaccttcaatacccattcgtgccaatagctttatattctcattatgtttatttatcgttgtgttttcatttatagacgatggtatgatgggttgggactctgaatcactcagatctctgggaaatacgattttattaggagatgcattaactaatctaccagaaccactgcttgtatcaaaggtactatcactatcataatcattattattcatattattacaatcattgttactagcaggtatggaaaatctaacttgcccctttggtgaatttattcctgaagatgatttatattttgtcattactgtttcatcatatagctggtcacttatttttatatcaggttgatgatttgtcagtatagtgtgatctgaatttgattgaaagggtaaagatggaatggtatccataggaaacccaacttttccatatttactagatattttcttgaatgctaaattgttgtccaatctggacatttcttttataatgtaataaaatcaaatggtaaacccttttttttatgcgtgtttggatgtaagtatctgggacgatatctggctaatttcatacacgaaagaaataaaaaaaatcaaaagagctgtagtaaactggagatgatttattagtatgtagtaaatattcccatataatagcaataaagctaatgagtatgtctttttatttttcctattttttttttcatttttgatatttagagtttattccttgagaagattggattgtaaatatgttcgagctgtttacaagtagtaatccaaaaaaaaaattacaatggaggctgtctcttttgggtaaaaatgtaaacaaataaaaattctaaaaaggaaatctgaaggcctttgatagatctgacatgctatttacctgaataggaaatagtgtctttaaaagaaaaagaatttcacataactcataaagcaacataagaagtcagtatatggaatgtcttggtttatagttgaattgctattaagattagcaataatgtttccaaaaagaatcaaagaaacaaaaaaaaatatttgttcatatagataaacacacatatacacacatacatacatacatacatacatacatacatatatatatatatctacgtatttatggacggatatagagataagttcgttacttatattctgaaatcagcatcgtcttcttcttcgtcatcatcttcatttgcttcttctttattagtagatgatgatggtgatagggatgcgtccttcaatacagatttggttttaatcgaatctaattcttttgcagtctttttatagtcaattatttttccacgggttcttctcccattagaaataatattagctgtgtcaatctcagccaaatcatcctctatatcattatctaaatcgtgttctaataattgatccaatttttcatcatctatatcagaatcagagagttgatctaaattaatattggattcaatttttgtattagaaattgatatattactgttgttattgttgttattgttgttctttaattttttaaatttttgttcttctttatctatttcagcatcataatcatcataatttcttcttcttctttttcttttgttatttttgctttcttgattactgtcatctatatttttgttttcaactttatttattgtatccccactactgatatttgtgggtttatttaaaacactcttattattactattatccttaacctctttagacatattttccttacctgcttattctttttattgtacttttctgttcacttttaatatggagacaccaacagatcaatatatgaatatagttcagtcaaaaaaacgtcaatataaataatcctaattaaaatctatacaggtgtaaccctcgcacacttacatgtgattatcatagtcgcccatctccttaacatattaatttatcttacttatctctttgtagtttttatttttgttgaatatttctttctttctttttctttctttctgttttttcttttttttttgtttcttttgattccaatttcttagggtttggttttctgtaaatatttgagaaggtgggttggttaaaaatgaaagtgatgttttactgttatgatgttgttgaagttggggagactaaagagagtgattaaaagcaagggttgagtactagctgttgttgcagtgtggttttggacaaggccagcaagaaaccgagattagagaaaaaaaaaagaagaacaaaacaaaaggtggaaaggttgtcgaataagatatgtcaggagtaaatgtgaaacaaaatagtcgtttatcagacttgataaactataaactgaaggtctttacacaggatggtagggtctatattggagaattaatggcttttgataaatatatgaatctaattctgtctgattgtatagaagaaagaatacctcgtgggcaattactgaaattaaatagtaaaaataaagatgttattaatagtataaagcctgagagaagagtccttggattaactatactaagaggtgaaaatgtattatcaactgtggtggaagataaaccaaatactacaaagagacaaaggttacaggtagagaaacaacaggaaaagaaaattaaaaaacagaaaagacaaaataaaaaccagaagaagagtcgtagtaatgttaataatacggccagtagtaatcttaaatctaatcaaagggatgggaaaccttcaaatgttccacaaccaagaaagtttcaacccccaccaggtttcaaaagaatatagaaaagaatatatgtatgtatgtagatatgtacgtgtgtattaatctaatagatgagatataatagagaatttagactggttggttcaagctttcttctagataaaataagaaaagttttagaaacaaagatgagacaaacctccttctattttgtttcttgttttttgtttttctccatccatctattgtaaagacaagaggtattggtcagtttcattactagcatttcctatcagatatattctgtcaacttcatcatcaacatatgcaacatgtgcaactctaacatttgttgctaggttaatcactatatcttggatactttgttccccataattgtgcatcactatattcttcactgattttcagtgcaacttgatttatttcagttttcttttcttttttctttttttttttttattttttatttttccttttcattctttttcgcctttatttcccgtttcatttcacttctttaataaaaggaaagagatttaacttaagaagaattgaaataaaggagagcaagattgttggttgtttagtgataaagaaagaagtattagatcttgtctactctatggtataatttaaatgctttctaatatgatttcataaaaacagaagtactgataattaaatctattttgtttataaagtaattcaaggtataacaaaaacaaaaaaaaaaatatacattagtagataaataaatcatgagttgggatgggtttaaaaaggctattaatagagccggcaatagtgttcttataaaagacatagataaagccacagataaagaatatgatatggaagaacgtaggtatagaatccttcaaaaagctggggatggtttacaaaaggaggctaagggttacttagattctttaagagcagtcactgcatcccaagtcagcattgctgaagtcatatcgaatctttatgatgattcaaaatatattagtggtggggggtataatgttggtaattattatctacaatgtgtacaagatttcgatagtgagactgtaaaacaattagatggtccctttagagaaactgtattagatccaataactaagttttcacaatatttcaaggaaatcgatgaagccattaagaaaagaagccataagaaacaagattacgaggcagctaaagccaaagttcgtagacttattgataaacccgcaaaggatgtcactaaactgccacgtgcagaaaaagaactggcctttgctaaagatattttcgataatttaaatgatcaattgaagatggaattgccacaattagtgtctttaagagttccatactatgatccaagttttgaggctttagttaaaattcaacttagattttgtactgagggttatacaaggttagcccagattcaacagtatctagatatgcaatctagagaagattatgctaacggggttcttgatgatagaatcgctgaccttctacaacaaatgtcaaatttagatatttgtgcattaggttttaagtaagtagtacaacgttgtgattttcttcttgtttttaagaaagttatgacgctgattattttttttatatatacttctagtttatcattactattttttctcctccttggacaataataagtagtataatataatatacacacgtagtatgattcaagaaatattcttttgaaatatgtttatggtaatatacatgtattctgatatatattaccagcttaaacgaaggaggagatatagatgtactagaagcaaaactgtgggacgaatttgtaataattttttttttattttttgattcataattatcggaatctagtatctatatatgtataaatagatatctctgtgtgtatggaatgcaatttggaatatgtatattatgtatatctataactcatcattttttcttatctctttttatggagatttgaatatgcttaaataaggtttacggtttttacataagtattactttcgaagtttatcactacagcatcttatttcacgtccccattcactatttaagatctgtttaccagtgattcttctatgtggtacaggatctaacattgaataaatcacattcctacatcttgctcttttcaaaatctcaattggttcatagccatctttttcctttcttgcttttaaatatttcaaataaaatttatcatcctttttggcagtattccataactgacgaccagtcctcattgccatatatatcacaccgcatgcccaaatatcaacaggacgtggatcaaattcttcttgtgtatattcttctggagcaatgtacggagtagacccacagataccaccacttaagtatatatctttctcccatgccatcttgaaacattcactgttaccaaaatctgtgattttcaatatcccatttgatgttaataacaaattttccggttttaaatctctatgacatacaccaacatcgtgcatatataccacacctttaatcaactgtttaaagaagcagtctgcctccatatattctaatttaccagacgcaatgattaatgtgaaaagatcaccgcctgcacaatattccataacttcacagtaatcacctttggcatcttggaaaagatctaaagtagcaacaatatttggatgatgtaaagacgacgatatacaaaattcagcagtcaaccttttggaatatttttccggagactcattgtttcttttcttaaattcttttactgcataaagtgattctaaatccttcttattagcagatttcttatgacaaattctcacaacaccaaatgcacctttcccaagaacttcttggcaatgtccatatttttctacaaaggataatgaatccttttgttttgagacagcaactggtttttttgcggactcactaaaggaatgtggattctgtttgtgagttagattgttattattgttgtaattattattagatgaaggagtatgaagtccatcaataatattattttccatttgcttaacgaaccccgacatcaatgttggtggacaattggttgcagtgcacgatttggttgctggtgagtccttgttactgttatttagcggatctgttattatatcaggcacagcagacctcgcctcatttcttaacttttgtgaacccataatattttttaacattgttgacaatttttcttgcctttttgcaatttttagatgatgttcatgagtaccattatcaaatactataaatcttttgttgcaaacgacattggaagttgcggtatttgttgataagatacttatatttgaaattgacacatttgatgacccaggtggattatttaattttttttcatttttattcgagatagtaggattcaatttgtctaatgaagtactagatttcattgaagaggccaacgttgaattagatgaactatggtatccgttattagttggtgcagtattgttagtgtaaagttttattgaagaattattacacaactttatcgaagattgaaaatcattgaactttgaggtgctgggagatagaacaggttctaatccagtcatgttcgaattggaatgaatagaagatacaggcgaaagcatttgtttctcattttgtgttggacctggagcgttgttttgaggagtcatcggtctagttatcttactggatgagtttctcgatatgcttgtccttgtcaatttggtagatttctcaaaaatggtaacgttgggggactgtgtttgtattaaatcatttttgtcattagttgtagaatttttattggatgaaaaaaaatttttgactttggataatgtatttcttcttattacagaggttggttgggtatgatctatcggtgtagacggatgtgatggacttggagaagaaattgagatggtagccattctttcttttccagaaaaaaataaaatagaatgaaatgaagtaaaataaaggatattcagattaagaaaattaactactaggatttaaactgataacagtaatggtttatagattaaattgtccttttttaggtgtacactctttcttcttcttttttttttgtctttttatttttttaattttcctactctgtgtgattttgccaccttgcttttattgatagtttaaaatatgaaaggttcttatgtacaatctgtttgaactggttgaaataaatgtaggatggaagtgtctgacgaaaacagtagaagtagtagtaacagtagtaacaatagtagtttttaatcgataaccgataagaacaatatatatgtatgtatatatttaaaatgaaatgatatgccacctaacaatatctcacttttacctggatagatttaatgagaaagaaccggctaagggtaatgttgcagagaggctgttgaatatagaacagagacgaattcaaaatcactacaaaaccagttttgcaagaatgaatagtaatttatctaatgttaccccactttggtaatgtgtgtggtatttgatgcttaacaaaaaaaaattttctttttcttttttcttttttcttttttctttttttctgccttgtcgatatttccggccacaattgaaaaaatctactgatggattgtttttaattttatttttttttcattttgaaggcaacaggctttgttattcatttttgatttatttcctaatctggggatttctttccattttttcccactttttttttccttttttctgtgtttttgtacgtgcgcatttcttgattgtttagggtacattgtcaaaagtagggtatttgtgtgttactcatgtatttttctcgttgtttgcggacttcaaattagggtggccacacaaagagtttgagcaatttggaatttttgtttttagagtgtccatggtatcgttatatacttcaaggctacttattgactggcagacacaggtagggtgggaaatatagtcagtgtaacaaacaggtgaatgtataaattacgtggttattattatcttctaaaattatctatatatatgtatacgtaaacacttcgtatcctgtgatgttatcatatcacgtgaatgttatttatttttgcaaaaagaaaagttaaacgaccccagtgaggattgaactcacgatcttgcgattaacagtcgcacgccttaaccagcttggccatggagtcattttacagacgatgatgctgcatactaagatttttaaattatagctattaaacagatagatggacaataatggattgatatagaggcgtcatattattaaactttactattatattttctttttcccaaaaccctgattccttattattcttaatcctaattattatttgtttaccttttcataatttcatctagtctacaacagctggtccagtcaatcaattacctttaaacacaaacgtatatcaaaacgtaattaggatttttgaaaggttaaatgcacgttttaatatatttgtcaataaagtgttccggttacgtaatgaaattttttagtgctgtcatttaaatgaaaaaaaaaatcttgtttagcttttttgtatatgtggtgtccagatgtactatgatatatagaaacttttttattttttttttttttttgtttaccaaaaaattttattcaaaaaatttaaagaaaactaaaaattttaaaaggagtgttgaaagaaacgagagaagtatgtttatacatacaacactaactatatttatgcatattaaatatcgagtgtatatacgccctttaccacaaaaataaagtaagcattcataccttagtgatgtcatggtattgccatagacattgagtgcttcaagttccaatagttttagcttggattttggctattagaacctgtcgcaaattacgtgttaaaaattatttaagtaaataaaataactgacaacaattgataagtttgtctatattaattttgttgaaaaagtcttaattcccaactaatcctgtttttattcgagcttttaaagttgctcaatgattcacaagttctactcgttcagtatttaacttacgtgaatttctgctatccctagatttaaagtttgctcttcatcgaattatcggtgatttccgaaaaatttgtgtgtttattggcatttttggttggtagagctatttaatggttcttcaatttttttttctgttgaccataatttatatgcctcacttttttttttatatttagtccctttcaacttatttattcctttattgtttaattggatacgtgcaatattagttataggatttgctcggtaattcaacgtaataatgttaattggtacaccaaagaattctatcaatataaaagcttgttacctgaaggtttcatgagtaaacaagtattggttagctatttgttaaaagggttaaaatatggtactagaaagatagttgtcttacagttcccaatctccttgtatcatactacggaattggctcctaaatatgagcattgtttattagatcctattaccattattaactttgcagttaatgttttaatagactctatttatgcttcaaatcttacttatggaagttactctgtatattgtattaatttttatttttaggaagggaagatctcataatttatctatcaccaatccatcaaatgatacggctttttgacatgataaagaggatcttcgttgtttatgtttggaatatggactatacgttaaataaggtaacttgggtcattaatctagcatatttctcaatgcaagttctatctcaaaccaataatgctatactttctaaatatttattgttgcatacaaatgtgacaattttatggttatgtgcgtttctcaatttttgcagccattgcccttaattctgtcctcgggccaatctcgtttgaggatctcactagttttttgacgtattatttattgagttcttacattggtgagccaaatgacccactttgttacacttgaaacatttgacaggcttctttttctccatccctttataggatttggaaattttaaaattcaacttggtcctgtttggttgagcttgcttgaaagtattttcataattacaagccatgtctgataattgtgtccacgtcgtagtttctggaggtctattattcaaaatatacccggttaatccagttggagttcgacgataaaattcaccagccaaaaactgttctgagatgaattcaggagctacatcaactaactcttgaaaatcatcaccaattttcttcatagacttaccttctcagttataatttctacatttatcgataaagtctcagaaagaattatttgaaccaaaccttttctcaatgccgtgaatcgtgtgttttaatgttgtaaaagtgtgttctttattctcgtaccacacttttgccgcccacttcagacgtaatttaatcaattgtaacataaaattatcatcaggaatagacttagaataaatttgataaaatgtaccaacagaatctttccaagctttaaaatctgttttgaggccgttagttttaccatcgtgggaatccttaccttcagcagcaaatttctcttttaaattttaattatttaatttggtatatgaagatttaattgtgaagaatagataggaccgtactattttattcagtttgtgggttcattattttattcagttaaatattttaacatgtttttgttcgattctgatatccaaaattcaatttataagaatttattaacaaacattacaaaattctgtctattatttttgttgagactgaacgcctgtagtcattgggtatatagtaaacattctcaatattatattagatagatatagtatataaaattataattaaattcttcggttttttttatttatatataatatacaaggatgattctaaaagatgaacaagggaagaaacatgatatgaaaaaaatgttagctttatatattttcatatctggtgcatctcatttacgaacagcatcaatttatcaatatgttttgtttacttttacaggtgagcaaacaatatatactctacaatctgatatcaaattatatttgctaataattaattgttttatctatttattctagaacgttcaatttcaacagataatgttgcaaaaagatgttgtagttaattttcaaaggacagtttttttatttttagttatttttataatttaatagttttgtaggaaaaggctttttttaaaaaaataaaaataatagcgatacggggagttacaagaaggaagtcttaaacaaacaaatctatcttaacacttctttacttatatatatattcataagaaaatgtatttaaaatgttactaagtgttgaaataaaatgttctataatgaaatagatagaacaataagattttagcagacactaaacgataaattgttgagtaataattgttgagaggttaccaaaggttgttgagtttgtttattaaatatcttactgttcgtagaggaaaatggctgaatgttaacatatataaagccaaggatttcatcatacattatttttatcttatttacaatctttgtgtattattacttctatgttgtatatagagaaagaaagtgaagaactttattataattttgtatactaaatctgtttaatataatattgagaatgtttactatatatccaatgaataaaggcactcattctcaatactaagactagtctttaacattttctatatactatataattatacaaatataaatacaattatctagaaccgagatattcaagtttttgtttatgttcattttctacatataaacttatgttggaattatgttcaaagtagaggccactgtattatagatttgttatataattattgattactaattaaaggtatatataaaccaatatcacacgttcatgatatataaatgttttatttctatcatacaggttgtggaaattaaatacttgactcataatttagtagttaattataataataccactttggttagaaaaccaaaatcctcaccttttttattattttgtacttttcttctgaaaacatgcttaacaaaatttttttaaaagatatgtgttgtaataattgggctgtttctgctaaaataagaagtgtatatataatattcagctactgatattactctataaaaatccaagtctacacactttcataatattaatgaagtcgctgacaattttttcacaatattagaaatgcaagtaagtcagttgtaaaatattattttaataacttatgtatttttacagtaaaatatttctttattattttaatcaaggaaaatcagtagttgaattcatacaataataaagaataaacaatatctagcttaacataagatttatataaactctattaaagtatgtagttatttttttattttgaatctggttgttcatttactttgatgattttctttgtctgaagtcctcatagaaattcgttcttaaatcaaactgagtaaagatcaactgtacaaaaatgagttatacaaggatattttgtatactccttactaaattttttgtttacctatataaattctcaaagtttttctagctagatgaaatcatttagtaaattattttttgtgtgcaaacattagaacatgtgtttttataaaacttttgatcttgcaaatctggtatatacaactgaacaaaatcatgtacttcatcagagcactttgaatttagatatgaatctgaatattggtaacctgtatttaaatttaaattaatactcccactatttcttatttctctattatgaacgcccattgaatcaatagttgacatatttggtatacgtaatgaagaaaaatctataatatcctttattttatcatccattaataagtatgtaacagaagaaaaagtaatctgtttacattgtggaattatctctttataaagttttttttgatccttttcatctttacagaaaagttggttctcgacatcaaaagagtttggagataggatacctaataagtccttagatagtagtattctttcataattaaaatcaataattaaattatctagaacaaaattagaaggaaaaaaagataagaaattcaacaaatctggaacaacaatctgaccaaattcattacaaaacagttttctaaacttgtacccacatttaagatcatctgttccactcttgatactacttttatattctgttaaagagggacaatatataatatcaaaaagaaactttgaagtgtctgttatatcatctgcagggaaaatctttgtggtgaaaagttccctaaaatttatttcatgtctataataatataaggtattatcatttattaataatataagcttttctttctttgtagtagtaaatgatttgattgtaaaaaatttcttcaaccttaatataatgggtgaattatcgatggaactagtaaggtcaattatatcaatacgattattaaagttttctagaaatagttgaagaatgaaactaaaatttgagaatgactcatcgcttagtacatctacaatatctaaataatctaataaaaattgtttagaatctatggcaatttttttaattatttcattatatatttcagttggtaacatctttctctcaaggaaaaaaggtgccaaatttaagttgtttcgaaaatgctactcttgccttactctatccatttcttaattgttaaaaagtgaaaggtgtgaactataagcaattattatacactattaatttataatgttccactatatatatttgggtaattatctatatgacaaatgctatttcatgtgctaatttttatgtaaatgctatcttgttaataatcatgttcattatgcacccttctaggtgtaaaaacaaaacatacaaaaacaaaaacctgaaatgacacccaatatattatgttaataatatagaattgttcgagaattttgaaaagaaccaacacacacacaaaagagacaattaatatacgatttatcaaatatttacttagagagatttgtaaataagtgcgctatacacatagaaacttaaccaatacttcacccaccgatatttatccctaacaaaaacgggtcaagaccatctttttaagggaaaacatctcaaacgccattaactacctaaaggatatatcaattagccatcggattcttcatatacataagataacaacatatcattggtgtgttaatagaacaatgttgtgtttttgcattgaaaagaagagacacacaatacacgttgtatctacatctattctttttttctattcttagaaattaaagacagctagggtttaagtttaaaaattatttcaccgtacaagcgacaaatggagttctgaaattagaaccacgtgcatatttcgtagtcttgttgaagccttaaattattgaacttgtaagtgatttaaaaggttggttgaaataaaatagtacttgttttcttgatttacactaattaatgtatttcattgcccagtttacttcttcatatatagtaagttgagcttgtcgccctgtcttaaattgcagaagaaatatctaggataaatatccaagtacactagagacgttaacataaaatcaagagtatacatcaaattttttattaattttcaatatagtgggaatatattattggattatatatatatatgtgtgtgtgtgccaagttaaacaacaataaattgttgtttttcatcaacaaaagtatcgaaactttcttttagtttgatctttggcattattctttttaaattttttatattaaacactaaatgaactgcatatgacttcatttgatctgattgttgcatattatcaatcagattaattatcgaacaacttgataaatcattccagttagagaaaccagtagcataaagttccatgtcattaatcatcacttcatcctcgccattatcattggcctcgtgaaacttgtttccaataccagttccaccacttatcactggtgaaggtgcatcaatagtaaattgaaaattttgtaaaattaacctttgtaaactaggtaaaaacaatccttggatatgattgtttttacccttatctattttcaatactcttaattccaatgtctccaaacatggtgactttaagcatagaatgggtttaggttcacctggcctagacatacgtgttggcgaggttgtacgaccagttgtgcttgtactatctaaagtttcgcttgatcctaatggcaaccaatttaagattttactttttttcacacttggtggaaacagttctactcggagatatgttacaccgtcttttgtttcatcgttaatcatagtagataataatttgatatttgctgatatttgctttgtggtctctgtagtcaatccagaacttgtgtttgcatcgaatttaaatcgatgaccaccaaaattaactaagttattcacgttccagttttttaaggcatgcaattcgaaataatatttcaaagtcattttattactggcaatcttttttagaatacttgttgaaagatcaatgaaattacagatagcgttgggacagttcttattataaaatttcagatcttgtagatctggaacattaaaatgaactttagtcaaaaagttaccaaataaatatgaaacagatgactcagcagtagtatttacagaatgatgtgatttttctccataaacctcgaatatgttagaaataaaggtatccatagccatgtaatcaattaataggtgtgttacagaggaaaatgtaatctgattacattttggttctaaccacttaacaacatcattaatactagtagcattattgttattacgggtatcataatctcttaataaatgtaaagattcatcaaagttaaacctatggttattattattattattattattattgatattattcctcgtaatgtcattattcatattatcactaagtacaaaaaatttgggagaataaatcccaaataaatccttaggtaataagattttctcgttattaaaatcaataattaaattatctaatacaaagttcttcggaaaaagtgaaatgaagtttatcaagtctggcactatttgtttaccagattcatccagaattttttttttaaccatatattcatttttcaccgctgatccatctctatttccttcaatgttttgattttctgtgatgagttcagtcatggagggagaatagacgatatctattaatagtttagagtattcttgtgtattaaacctgaaaaacaatttttcaaaaaactcaataaattgagttctattgatatatttaattaaaatgtcatcattaaccaataagatatatttgtcctttttctgactagtaaaacatcttatatcaaaatattttcttaattgtgctattagcaaggaagagtctgaggaatttgtaagatcgataatatcgacgtggttattaaaattttcaattaaatactttaggagagactcagtttcaatagaatgtttatttacagcgttagtaatgttcaaataatccaatatgaattgtttagaatcgactttgatattactaataatttttatgaatatttcaacaggaagaaaagagttatggccgatgtcatccaaagtaattgtattcattttggtcacagtacgtttttcaactgtttattttagaccaagttgctatcatttaaattcttatttgttttaaacagtaaaagtggagttaagggaagtgaggagacaagagtttcggttttcatatatggttatatatacaacatttcttgaatatagttgcaatacctttgataagcaagaaaaactctacgcacaaaaagttttaaaaataatatttttcagtgttttttttttgtttatttatttacaagattttcctttatagattccctgagatggtttaaaggatgcatcacatgtctctggatgtgtcaaaaaaaccccaataaatgagaaaactgtttctttcttttaaatcatgaaatattttaaattaacctgaagaaacaaaacaaaacaatttagatgaaaaaaaaatagagactaattactacggtttcccttatcccggcaatgattctcatctaatcctggtaaaaaataaaaaaaaaaaaaaagaaagaaagcaaacaaaaatgtattattttatttgtcgtttgttattataaaagcggcaatattgacaaaatgacggatcagcggagtttatgatctacttgaccaatttcataaaaaaaaaatgaaaagaagaggaaaactcaaaaaaaaaaaaaaacgaaataaaaaatagtgacactggatattattattgttaaaatctgctgtgtttgatccaatatcctccctaaagatcaaagctatacgtatatatgtatattttagtaatcgatatctactttttacccataaagtgaacttaaactcatttttttccttcctcttatcttttcttttcttttgctttcttttttttttttattaattactctacaacatttaggcaactttcttgttaagaatagtagatttgtttatagtcaactacatatatacatatatatatatatatatacatatacatatatatatatatttgcataattcatctttataagtttttggatttacgacgaaaggagataatggaatgttaaatgatagtgtaaaaatataagagggcaagaaggaccaagctactatataacttcagataagaggttttgtacatactaactaatattcattatatcactatagccaagttactattacaatattacatatcacaaccattgttatattttaaccacatgaacttagataggcaataaatgactttattagtctattttgacctagaatagatagttctgtcatgcattcctcaaattctctacataccttctatgtgtctatttttgtagaattttaaactttaatatggtttagcaatgccatacttcataagatattatcgttgtatttgtaattactttaaagtgttttttttctttttttcttttgtttttaatttctattgaggatattcttcattttaccccttattttcctctctctacatttcttattgctcttttttttttatttttttttattttttttgcactagtatctacatatgaatgtatataattccaaaatgtcgtattgagggttttttttccttaaaagaagataaaacaaaaatataggaaatgagacatatggggggataagaagcagaatagagagaggcacaatcaagatatccaccaagcgtctccttaattttagtttaatttaattcaactattttttttttttggtatgtcgacccttcttccccccacctccccttattgtctattattacatttcattgtcattatcgttttccgtcttatatgaggattttcccctttttgtattacactccgtttccctttaatttttttttttacatcccctttttttttccttatcttacaaacaataacaagtataatagcactaacaatgaaatgtataacaatacagttcattttagggagcaaaaaaaacaaaacaaacgaagacatcttctcgagtaacaggaaaccaactttaaatatcattaaaactatctcttatatacacacatatgaacgcacacagacacacacatatatatatagtaggatttgaaaaattagagatctcaatacctaatagttttctatgcttttcttcttttccatgtctttccagttcgcctttttttcccaatgggcatatttcttaacctcaatttttacttttgttttaagtagaattccctttcttttttttctttctccccccccctgaaacaacaaatacacatacacaaacataaatacatatattccatattccttttttttttctctctgttatatctttttttttttgttcttttcaataatatattttttttatgaataatggccccagctactactagtaccaatgatatgatcactgaggaaccctcctctccacgtcaagtcccaagattagcaagaaggttaactggtttccttcctcaagaaattaaagccattgattccactatcccactgaaatcaagagccttatggaacaaacaccaagttaagaagttcgatgacgccgaatcctttcaaactagatttatcgaccatgtggaaactactttggctagatctttatacaattgtgataacttggccgcttatgaagcagcttctatgtctgttagagataatttgattatcgactggaataaaactcaacaaaaatttactacaagagatccaaagagagtctactatctatctttagaattcttaatgggtagagctttggataatgctttgattaacatggacctagatgatgatgaagtctccactgacaagaacaattctagcaatccaaataactcaaagggtgaaaagaagagttcaagagatattatctccggtgctttagatgaattaggtttcagattggaagatgtcttagaacaagaaccagatgccggtttgggtaacggtggtttgggccgtcttgctgcttgtttcgttgactccatggctactgaaaatattccagcttggggttatggtttgcgttatcaatatggtatttttgcccaaaaaattatcgacggttatcaagttgaaactccagattactggttaaacttcggtaacgcttgggaaattgaaagaaatgaagttcaaatcccaattaccttctacggttatgttgaaagagatgatggtaaagatagcactactttagctccatcccaatggattggtggtgaaagagttattgctgtcgcatatgatttcccagtcccaggttacaagactaataatgttaataatctaagattatggcaagctagaccaactacagaattcgattttgcaaaattcaattccggtgattatcaaaactctgtagaacaacaacaacgtgctgaatcaatcactgctgtcttatatccaaatgacaactttgaacagggtaaagaattaagattaaaacaacaatacttttggtgttctgcttctttgcatgatatcgttagaaggtttaaaaagtctaagagaccatgggctgaattcccagatgaggttgctattcaattaaacgatactcatccaacccttgctattgtagaattacaaagaattttggttgatttggaaaaattggactggcatgaagcttggaagatcgttactgctacttttgcctacaccaaccatactgtcatgcaagaagctttagaaaaatggccagttggcttgttcggtcacttattaccaagacatttagaaattatttacgacattaattggttcttcttgcaagaagttgctaagaagttccctaaggacttggacctattatcccgtatttctattatcgaggaaagtggcccagaaagacaaattagaatggcttacttagctatcgttggttcccataaagttaacggtgttgctgaattacactctgaattaattaagaagacaattttttctgatttcgttaaattctatggcgcttcgaaattcactaatgttactaatggtatcactccaaggcgttggttaagacaagccaatcctaaattagctgaattgattagtcaaactttgaatgacccacaatatgatttcttgttggatatgccaagattaactttgttaaacaaattggctgatgatagagaatttcataagaaatggaatgaagttaagatccacaacaaattaaggttagccgatttaatcaagaaattaaatgatggcgttgatattatcgatagagaacatattgctactaccttgttcgatgttcaagttaaacgtattcatgaatacaaacgtcaacaattgaatatctttggtgttttataccgttacttggcaatgaagacaatgttgcaaaatggttccactcttgaggaagttgctaaggtcttcccacgtaaggtctccatttttggtggtaaatctgccccaggttactacatggctaagttaattatcaaattgattaactctgttagtgaagtcattaacaatgatattgagattggtgacttgttgaaggttgtctttatcccagactataatgtttccaaagctgaaattattattcctgcttctgatttaagtgaacatatctctacagctggcactgaagcttctggtacttctaatatgaaatttgctatgaatggtggtttaattattggtactgtggatggtgctaatgttgaaattaccagagaaattggggaagataacattttcttgtttggtaacttaagtgagaatgttgaagaattaagatacaaccatcaatacaatccacaagaattaccagaaaacttggaaaaagtattagagtacattgaacgtggtgaattcactgataatccaagtgaattccaaccaattgttgatgctgttagaaagcatggtgattactacttggtttctgatgattttgattcgtacattgctacccaagaacttgttgatcaagtcttccacaatgaaaaggatgaatggattaagaagagtattctaagtgttgctaatataggtttcttcagtagtgaccgttgtatccaagaatatgctgaaaccatctggaatgtcgaacctgttaagcaataaactattacttagtttttttttgtgctttcttctactactattctaataaataaatctattttgaattttgtgccaatatatgaaataagcatctttaaaagggattggaaagaaaaaaagatgaaggtaacacaaaaaattaacgacattatgtgataatataatttctttataaatttttgtctattttctttatattgtatttcctatttaaatgataatataattcactgttattacttttattacttgaaaagggctttagctacatctgtcttacatttgttttttttctttatgttataaataatacacagcatagaaaactaaataagatcgattatgagtttaagaaaaaaaagcttaaaagaaacaaaaaaaaaaatcaaggttctcgaccgcggagaaccttgatatttttagtcttcctaactgtaatatttacaattcaaagcaatttactataacatcgaaaaactataaattgatttgaattataagtgtatgtcgattttgtattatattcatcagaaagaataaaacaaaaaagaaactaatgactaattacaaaaataatttaatctttcttaactatgaagatgatgaaatcaagcatttcactcatatgaagaattcaaccacgtggagaggattattgagcaatgaagaatatgtagaaagagaaaaactgcttggatctacttctattgcaaataaagatcaaaatgctgagctccaaagactttaccctgaatgttctaaatggttaggagtgaagtattttgtcgtaaaagatcaaaatttacctaatatagacaaatattctcaggttgtatctagttgtgaaactttaaataggattggatattgtattcgtccagggtcaaataataatgaaatcgaaccagccctaatagtatgtattggtggtgttttcaccgatgtaaggcatagaggtaaagggtatgcatcgtatatgatcaattcattaaacaaatattatgatgatgtaagggatcaatatgggagccaatctaaactgatccaaaatatggtgatcaacctttatagtgaaatagatgattattatgagaagtttggttaccattctatgcatatcccgttacataacattacaaatttcgaattaatccttcaacaatattgcaaatataaacctggtacccatataaattccactgatgataaaggtattaatactgttcaaggtgggaaatttctaggatttgatggatatgaacaccttataatattacaagatactcaatttaagcaaaacctatatagattagctgaaagacaaccaaataaatttattttcacagtcaaaccagatctggatatatttatatggtttcatgtccgtgatatatttataaggagaaagttgagtccaaaacatgaaagtaatgatattgagataccgtttggtttttcattaaccgataacagtcatgtaatctggcaccatcattggaacgaaaatactcttattcttcttaagttatatattgccaatgatgataatacttcaaaagaagatgttctaagacaattgcttaaacaaagtattctagaagcacatagaagaaatctttctaaagttcaattttgggatgaagagattcctcttaagatgtatccagagttggatcaaattttacataactcagaaaataaatctcaattgtatcaagtcaatggatcagtaagtgctgtgagacccccaactggactaacaccagaagatatcatttgggataataatacaaagttctgttggttttagaatatatttatagaatattccatcaaacaatagtatcttttcaactccatatacatattctatatagatatatacacttagatacatatatatttactttgtcatatatatactgaactaagcaggccagactatttgatatattatgctttatctaatatatacttatatgtatgtatgtatttgtatgtgtgtgtactatttttctttttgacaccaaatccagatatagacagttatatgtatatctggatttggttaataaagaaatttggaaaataaatatagatagggaaagcgtttcatttaaagaaaggggtaatgattcaattggtcccaatatatctagaatacgtttatgcctaatcatacatacctttttaaagtaaaataaagtattttggtagtatatctatgaatgagcagataatatttgacagaaacctatgaatataattaatattctttacagaacaatgttaaaaaattcatcttttaagtttgtccatgaatgttcacggggagttattctgaggcaattgagctttcaaagaaccacaatgacatctactattgattggaaacctattaaatctcacaataatccaaacgatagaaatggttcaaatcaaaacggtaagaaaagcagggctggtaaaaaaattgcattgggtttgatgattgctatgccagtaatctcattttacttgggtacctggcaactaagaagattagactggaagactaaattgattgcagaatgtgaaaccaaattaacttattcacctatcaatatacccaaaaattttacagtggacatgtgtgaggattgggaatatcgtaagattaaagttaagggacatttcgtatatgaagaagaattatttgttggtccaagagctaagaatggagaaaaaggatatatcctattcacaccatttgttagatcagatacaggtgaaaaaatattggtggaacgtggttggataagtgaggaacatgtgccaccagaaaatagatctttacatcatttatctataccagatcccaacaaagatattgaactaatatgtttagtacgtccaccaaagaaacgtgggagatttcaatgggaaaaaacagattcagattcgaggttatggcaagtggcagatatatttgatatggctaaaagtgttggttgcaaaccaataaatttccaagccatatatgatttatgtgatcatccagaatggcgaactaattaccaaaacaatagtagagatggtgaaagaaaaacaaatcaagaaaaaagatctttcttatggaaattaataccataccatagatccagtgaaaatgataataagaatgttagtgacgaggccaatgaatttggcattaatgataaaaataccgaatttacagaatggcaatttatgaaagcaggtgtaccgattggtaagaaaccaacagttgatttaagaaataatcatttacaatatcttgtaacctggtatggtctatcatttttaagtactatattcttaatagtagcattaaggaagtattggtggaagggcaacgttgtatcacaattacaattgaaacaagataagctgaaacacgcaaaaagattttcataacttataaagaaaatatatacttctctatgatagtattttgtctccttattattgttattattccttacctaaaatactattctgtaaaaataaaatgggatggaatggatcaaaaaagataataatattacaaaagatttttttttgtaactatattctagttattcaatattctcactgtctctccatatatgtatatatatatacactttctgtgtgtaaatacttaaatcactaatcatgcttttatatgtatggacacgttgtatatttaggtgttattttcaacaatcatcagcaacattatctgtgtatgacccaattgctgtttgcttagacatattgtatggttatattattcattcaattttttctttcttagtttctttgaaagctttcgagacagagagagtttgaaaagaggaaaccataaaaacaccaatgataaataaataaataaagagaagagaaaaatacgaaaagagatacacaaaaaaccttgcctatgctcaaaagaataaagggattatttggactggattgataataaggtgaatattatagtaattaaaacatagaatatctttttgtaaactttatcatgaataatagtaataatagtactaataccaatactactactaatactaatagagataaggatgcaagaagtagtactggaaccgaatataaactatctataaatagtaattctggttctcgaaggtcctctttagcaggaacaggaaatgatatatatttaaataatggagaaaccaacaataacaactataaaaataatacatttagcaacggtcgtctaagcataggagggagtgatcaagacagtaatacatttaatattctccataggtatttaggtccacagataagtgatttacacgattctgtaatcacactggagagtaatttggatcgattgaataatatacacaacaatttagttgatttgaacgaatcatttggatctctagtatatggactgatttgttcatcttcatgtttacagtttcctggattatctaataatataaaggaacaaatgagggtatttgaaagattaaatcagttggaaacagaaaaagacaatcttttgaaacagataaaggaaactaaatcatcaatgatagaaaatagtaatttaacgaataatcataataatggtaagaatagtaataataataattttaagttaaatcaaaattttagtaaacctttgtttacagtaggtgagagtaggaaaatgaaagcaacaatgaacaaaaacatatcaagtttacccaagaatagaaatagaaaccatagtagcaataatgggagtgctaatgatgattataatatacataaagaggacgattatgatgacggagatgataccagtagtgaagcatcgtttgtagtaaatccatcaaactcccaacaagaatacttaaggaatggaaatatggatgatgtggatcgcagatatagaagaaaatctatattaaatgtaattagaaacagcgtaggatatagtaatgcaccagaatccaatcttttgaatgggaaaacaagcatcagcaatgaacgtggtgctaacactatatctaacagatattctttaggtggccgtgcaagaagagttacacatgggtctacattactatctgcttcaaatcccattacaaatcaacaaagaactaagaccacagtggccaatactgtaacaagaaggaaaacagtaacaagacgtccaaaatccataaatgaaagaccacctttcagataataagcaagagggtaagataagaagaataaaacagataaatagaaaaacatcgaaaaagaagggaagatgagggtgaggataatattgatattaaattaaatgaaaaggtataacagttacatctatccttataaaaaaaaaaagttacagaactgtgttgtcattattagtagtgtttatgaaccttccttcttacctactgatattgactatgacattatgtagatgtcatttgaatggggagagctctaacaataagataaattgtctaacaaaaacgatagtttaatcataaagactaacttttctcctccctccccctcctccccttccgtcgcgttttctcttccttttcctatcacattagatatatataaaactgggaagagaatagaataagctgttctgatgtataagcatataatgtagtgtaaatatgtaatataatattacaccatatttatttgtatatttatattcattcatatctccgtttgtatctccgtctgttccgtggaactgtttggtggtggaatattcaaattttttgtgtcatttgacacgacaaatttatgcagcttttcgtacaaaatgacaataattttttttattttgatttttagtcttttcccttttcttttttttctttgacagaaggaaacattttaatccaaatgtaaagagagtaattggatcaacctgttggttgttgcagtaatttattgacgttatgattctcaagagagtttcaacttgtacactgtcacctaatttcgtaagagtattacttagtagcttttgaactattatcactgtcttctgtccgcttggagaaagtagtgttctgtgtattgggacaacgataggaaggaaattacatcaagttaggacaaaggggatagcataagaaagattaaataataatacttattagtattttacttttgtttattcatctacacgtacgcgcacatatatccatatttatatacatatatatatatttaataaaggcataaaatgtctcaatatattgggaagaccatttccttgatctctgttacagataatagatatgtcgggttactaaaagaaattgattcagaaaagggtaccgtcacattaagtaatgttcgttgttttggtacggaaggtcgtaagaattggggaccagaagaaatttttcctaatcctactatatatcaaagtgttcaattcaatgggaatgatgttaaagatttaagtatccttgaagtaagattagaagatgttcatcctattttaccaccaactgctaatcaattgtcaattgtttctcctccttctgcttctaccacaaatgctactgcttcacaacaacaacaacaacaacaaagtcaaaaccaaaattctgcaaacaacgtggaacaaacatctggtagtaagaatatccccgctgcagttgctgggtatggggtttatgcaccaacacatactagtgaaacagaagcaactattaacaccactagtgctagattaaaaagtaatgataataatgtagtggatgatacacctcaggataaaaacattgatgtcactacagattctgcaaatgttaattctgatgcacctgctgcttcaattgaacatacttataatgctcaacaacgtcaacaacgtaatcattactcccattctcattcttatcgtccaagaaaccaaaaaattgaaattccaaatagtgattttgattttgcttctagtaatgcaaaattcctgaaggaaaatcctactatggcattagataaacaagaaactagcccagataataatgatagtgaatcaaccgtagattcttctaaagaagaaaccttctataacaagaagtcatccttctttgatactatttcaacatctgctgagattaataccaatatgaggtggcaagaagagaaggaattaaatatggatacctttggtcaagtatctattaggccaagattccatagtaatagaggaagaggtagggggaattacagaggaagaggtagaggaaattatagaggaagaggtagaggtggtagtaataacaataatagtaattatagaggcggataccacaataataattatagaaacaacaataatggtggagggtttcataacaattttgatcaaagtaatcaagtgccatcttttcaaaatcaaccttctgttgaattttgattatgttaattatgtgatataattttctctctttttttcattaatagtgaatgcattgtattttaatgggatctcattaaagatctacaaataataaaaaaataataaaaaccagaatacactaaactaaatatgtatcaaatgttgatgtctatgtatgtatatatgtatatgtgaataccaaactaaaatttaaaagtaacaattttgtaaaatttactcattgatagtgagataaatgaaatagccatgtgctatgaatatatacaatataatattatgtgaaaagggtcttttttatagacaaaaccaaatccatatattttaagtatattggctactggacgttataaagacagattgatttatttgagaatgtgagtaaaatgtattcaccatcattcaaaatatcaatatgttttacagttgtcttgacagaaacttgcaacattttttgtaatgaccaagattcggattttattagatccatcgcaaataacccatcatcgttcccgattaataaaccattaatgattggacaatatttaattattggttgtgacaaattattgttcgatatctgagttgctatattagatagaattttatcataatatgttttgatattggataactctgaacatgtttctgaattcttactactttccttattacttggtatttctactaaaatgactctcatataaggcatatgtgatgttgcaacggcgaggatttcattattaatgatatcaatatctcgaataataaatgaatgagtagagaattgtgtattgtttaatgctagataatatttaatatacaattttgatgttttaggattcaaggaataacatgaaatgttcgtgaaatcatttcttgctaaaaagattgacaactcagattccttggcacaacattttaaagaggtacaattagattgtaattttaatgaatctatttctttgatctgtacgataaaattgtggtttttattttgtgtggatactttctctatagttaatgaagaaaccttaagtaattgatctaaatctgtagatacgatgacatattcctcgattatgttatctttatttttactatattgactatttttaaatgtgggaagaaaatcaatatgtgttatcatccgttgatgtaacttgtaaaagtattgtccaaaatgtttgtaactaataaatatttgcaatgtaccatccattgtacatatataattaatagcattaaatgatttggaacttatagatcctagtgttttgactacagttttcaactgaatttgctcctttatttcattcaacaatctatcatatattataacttttttgtttgataaagataacgcaatattatggcctttgttgacaaacttagagacaagtatcaaagagtctgaattgactctgtttattattgaccattttaaattatggttccactgtttaatgtttgaagattctaatttaaattttacctgagaatcattttcattatttaattttaaagactgtatttgttctgctaaattatattcgttatattcaatccgttctttaatgatagtgatcagattttcatctttaaaggaatataaactatcctgggctaatagattggtgttagataatgaagtctcttttagaaacgatgccaacgtttcatctaacttgtgtgatttcaaataattagcaattaatagctgagtatatttttctgcgatgccctctatcataattaactaaagcaactcaaaataaacgagaatgagaacaaaattcacaataactatgacaagtctatctttttttctcttttcacttactactttattttgttccaccataatacggagaacaatattaatttagctctattagtatcaaatttgatggatatatccaacaatatatgcctttattctagccatttacatattaagagacaattcagtctttgggattatgtttacatatatatataattggatattttgtctaaataggcaagtacaagttgaagagtaatgttttcctatttaggcaattattaaacgtatgtggatatgaacataatttgtataaagtgaagtttctttaagattctactttatttatcaacgacaccaacacttttgataacttgggatatgtagcaatatcacttaaacatttatcagttattatcttcaatgagacttgaaattcttggattaaaccttgataatcattataaagatgatttagaaatggagagtgtagatcttcaaatttaataaagagtaaattacatttcattatatgctcattaatcttttcaatcaaatcagaacataaaatttcatcaaagtcgtctaatccacacatttcgtgtaaagtcttactcatttttttaccatttgataatctttgggccaaaaggtcatgttccattaaaatatttgatattttgtccaattcctttaaatattcacagatatcaacaattttttctttactgtacggtatatctttcgtcagtaattgatttaaatccttagtaaaattttcaatatctatttttgttctttgtaattctaagagaatttcattatcattcctatcataagtcttaaaaaagtttatataattgttataattttggataattgcatttagtaaatttcggagtgattcgtctttcaagcctgaaatgtttctaattaacgtgtctaatgaagaatattggaaattatgatccattaagaattgatcaatatcgaactctatctcatttttatctttattcttatctttgtctttttttttaatagaatatttctctaatgtattagcaaatagatcaacagaaagttcacttgtttgaggtagctctaaatcaagttcttcattatcatctaaaaagtccatcttagtcctgttaataattgtactatactgtgtggtgccagcagttattccactaataagaggataagatattaattaactcacgagtttttagttgtcattagaagttgattagttaacaaataaataactgacaacacggtatggttgaaataagtgcggtaaagtaaacagttcaagcatgtgagtattatagtagaagtgtttttgtttccactttggtccgggcaacgtttaaagtgatttcaaaaaatagtattaataagaaaagagaagagctcttatttagcaggttttatttagcaatagttgaagagttctgctcgattgtcttctgattccttcgctacgtctggtgctgtgaagaactatgaattatgtcgatttcgaaaaagcttctagatcgattttattattctaggataaagggatattaaatacattagggtgttctctatcatagattagtttttttttgtgaaccattagttcacagaattgatgataattagggtatgatttccataattaagtctaagaaaatatatgatattccgatcccatttgatgataattctgttattgtaaccagcttcccttcagatcttcgatatttaagacaaaatgcagtaaatattgttaaaaagacaatagctgccactaataagaacattaatctcagtcttaatattagtaataaaggaagccataaaattgcggatctttctaaagcagatattttattggaatatgccaatggtttgacattttttacaaagaatcattttgcatctttagaattacaaaatgaaattattacatgtttgattaatgttgggtttttctaccagaatgtcgccttagatatgttacaaaatgcatatggatcatcacttaatgattcagataacctatggactactagtggaacatatttgaaaaaagggttaggtatcttagaatatttgaaaagtgtcatacctaatttcattgacattgacttgtttaaaagattatctgagatgatagaagaatataaattgattcaacaattaggaattttactattatctttgactaaattgaaaagatcgttatctaatggtagtggagaccaattaaatttgcagacaaaggacttaaaggaagcttcaagtacatgccttttttactctaaaatttcagtgggttgtcttgagacttgtatacaactaggtaaagggcgtgtaataaataatacgttgaaagattacctccaaggtctaatatatcttctattatctatggatcaatttagaaatgaacaatgtggggtggctatcgggatgttagaacaatctataaattcattcagcaatataataccgagatcagcattaacatctactgtcctttccacttctaaaataaagctgaaacctattaatagaatgaagagttcatttaagagtacattattgaaagccagacaaacatcaaaaagtactactagaaacgatactcatcatgctaataataataataataatttgttacctgcacttaatgacacattagaaaattttattattccactcataagtttattagattatgtttatcatcacactaatgataagttattttttcaacctgtaattacaagtgagtttgaattgaaaaaatttcttccaaagggtaagtctccacagttagaatctttaccttggtggtttaataacggtaagattgaagaatatagaggaaacatgagatctgtccaagaatcgttattttaataacaagtaaatgtgtctacgtggattaactatgaatactttatgaactagctttagtcgaaatagaacttttctttataactgtgagatttttttatgaaaaataatgtatttgggataaattgatctgttagacttttcactatgttacattcaaatactctacattatatatttgtaatatttaataattcctgtctttttgtcaaagaacatgacattttatagtaatgtttgacgttgttacaacgagaaacacacagatttttcaaaaaataaaatatgtcaatttttaaaatatcacctccgaataataatacttaatagttcagaatttatttaaataatattggaattgtaaattataaacaacaaaaagagggggctgttatttatacttattggtctaaaatatggatattcttctaccattactaaaatatatttttttatcttttttataaaatatcaacctaccaattatttagaaaagtacatttctgaacataataaataatgatttataatttgataactaggttcataaagaattatataagatgatacttctatttgtagaaaatacttgaaaaacaaagcataagaaagatgaaagaatgaatgattcgaggaaatttatatagtattttgaaattgggcaagtcttagataaatttgtaaaaatatgcagataccttaaaagaaaatgtgggaaaattaaaatacaggttttattgcggatatttctgtttaaaagcaagttttttcaatatttattatgggatatttagcaattattagtagtttaaagtgctgagaagcttagtatggaagtttttttaatgttaatattaaatttttttacgaagcaccaactatacactcttatttatcaattataaacttgatagattactttggaattcaaaattacagataatatgataattttacaattgaaaatatgtgattttggagaggtcggtaggtttaaccacattagctgtttaaaaatgttattactgatgtaaacaagtctaaattgcactaaaatcaatgaattttaattaatttattaatctattaatctatgtgtgaatatgtcatttcaaatatatattttttcaattctatggtataaaaagcattggacagtaatttcacatcaacttgttcccagtttaaatattaaaaattgatgtatttagtgaaaatgttggtacatctcttacctaagcaaagttttgttttgtttttatcaggagtattagacacagcattaaacttctatatgatttgtagaaatatacacattggatatttcaaggaaaatatttaaaaagaatacaaaaagaagaagaaaacttaaattgaaatcttttatagatctagtatataaacttataatttttttgtacctcctttggtgaattatgaggatgttttcttaccagttttttttttaattaaaatagaaaacacattgaatccaatattcttcaaaagattttaataccatattagcatgcatgcaaggtatatgaattcaaacttagactatatatacttcagaataaatatgtttattttatagcattaaacctttaggccacaaatttttagtaatgatatttatttttgttattagtatacaaatttatcataattgataatttgccaaaaatatgatattagattcttaacttctatggttatgacaggcattattaaatttagatacttgttttttgtttatattaaatacatatatacttataatatattccattttacataacttcacttattgttttcaataattctattaaaaattttctttttctttaatttttgtttcctgtatattatagtacatttatacaccatataatatacagaaaaactaatcaaaaagaattctcatgaaaatgacaataataaactctcattttccaacaagtatataagctcgacataaccgttaatatataagatcgtattaataattgcattaccgattgtatcaattattgtctcgattattaatagattatccgtttgatatttctagcgcttccccgaataatacaaaactctgatcatatcatattacaacagggtatcatgttgtagtatggtgtggtgaagttctttgtgtattccagggaagcgcaaataatattaatagtaattcaaataatcgagacagtaatcaactatagtcgatagtataattactaaacggtcttatatattaagcgacttatatcgagctaatgtacttattcgaagttacttgacttgttacttgcttgttgttctctttttgttcatatataatatataaattatttacaagaaacggttatggaagatgatcttttatcttcagaaaacgttgtccttttatatgttttctggagctcgatcgattattcagattagtacattaatgacttgactgattcaccctaaaatttattacattaatttaggtgcactagtggattagaactgcaccccaattctctaatcatggtgattagtaatacacgtgggacctattaaaacaatagataaattctagatttgccaaggtcttatgtaatccaatctttttattatgcagcatctaatgttgtagcacatgtatggcttactaatacactaattggttctagattcattcaggatcttatgtaatcttgatggttataactattctattccgcaacataccacgggttctgagctcgcgtggcgtaatggcaacgcgtctgacttctaatcagaagattctgggttcgacccccagcgtgagtgctcttttccttctttgtccgtgatagtttaatggttagaatggacgcttgtcgcgtgtcagatcggggttcaattccccgtcgcggagttttttgcatcaatgtaatagatgaaagcttattacgagaaatgtgatatatgaaatccggatgtcactataaacgatcatgtttcttcccttacccatcttctatatttcatcattatacattatatacataaataaaaaatgaagaactttattatgattttgtatactaaatctatctaatataatattgagaatgtttactatatatccaatgactacaggcgctcattctcatcagtttttgtagcaagctctcatctattaaatctgatatatatttctagtttagtttgttttatttttgtaagtttatatcctttaaaaagagttcatttgtgacatatggacttgtaagatattatgttatcttggaaggttgctctaagaagaattatacaatattatagacggatagctaaaaatagaataaatatgatatttttgtaaactttaattaccattatttgtgtattttgaattttataattgtattcatatattttatttttgaatttgtagagttactggacaagtaaagacaaaaatagctcattgcaagtatccaataaaagtcaatctcataaatatgcctaaagtcctaataatcatttttttcatatcttccttataactgttaaaaattagcgcctatagtaattgggtaaatagtatatattctcaatgttatatatatatagagtgtataaaattatgattaagttcttcggttttttttatttatatattatatacaaggatgatgtataaaagaagaacaagggaagaaacataatatgaaaaaaatattggctttatatactttcatatctggtacatcccgtctatgtacaacatcaatttgttaatatggtttgtttatatttattgataagcaaaaaatgcattctccagattttgttattaattgatatttgctaaaatttaattactctatctatttattctaaaacgttcgatttcagcagtaacaagtcttaattgaaaaatttgtcatataaagaagtacttagaatgttactgtaactggtgcttccgattatttatttaaaatatctatatattgatcataagtaaaattatatggtcttctctgttaaaatcatgaaaaaggatatatacaaatataaaactcacttggataagatattaaaacaaaaaataggaaatttattttttgcattctgaccttgtccttatataaaatttcatctctaaaataaataagttattctcacacatttttctgacactgcttcttttattggcattattaaatttgtgactaatataaaaccaataaataattcataatttttctatggaatataataacaacatacaaaaaagatgagtgcaacatctaaatttacaagtttaaatatttcattcaataaaagcattattacacaaagaaaacagatccaaatgttttgcaatatttattttctgtttgtctaggtgtagtgactaactttaaaataaaataataaataatatacatatgctatctaagagttttatattataaataatataaattatacattaaattatacaaaaaaaatgaaaaattgaaaaattcattattttcgaattaccaatttatatacgctgtttgtaatattcatattttaattttctattaatatattgaagttatacctttctagtaaaacaacagtatattttttcctcccatcaaatcgtgattttatctttatgatgtacatttcactattgtataaaaatttaaaaaaaaagttaatcatatctttcaccattgacagtaattctattatcttttagtttattctgaagataaactccatcagattctctaataaggccaaactcctaatgacgttttaagagtgtctgatttttataaaaaaatctttcattagagcaatttatagaagataaattttttattgagtgaagttgaattttttatgaatttctatataatctctctagaggaggaaatcttataaattttctatttcttaggttttggatcataaaactgtgggctgcattgaatatattatataatatatattacaaacttactgttctaatatgcaatgatataaatattttcctccttggtcttcttctagaaaataggcaaaacaaagagaaatatacaacataatatgctataatatctttttctagacggaaatgtataaatagaattacttatttatatcgtttttattttcattgcgtatagttatataaaatatcttgtctactgtatatcacacatgtgccacattcaaatagaagaatgtttttttcctacaacaataatcaacatttagtctaagctttctttttaaataaacatgtaatttttctctgtatattttttatgtattatattgtataaagtctcattaattcttctttaaagactatataatatataaaattattaagtttaaaattgatttctttcaagatggaatgataaagataattttaccttttctcatttatacgttcatggtcataaaagactttgtctatttgtctttttataaattatactttgtaaataagcatgatgacaataatttcatatttattcaaattgctcttactaaagatgacacattttgaaacaaacatttgccaactaatttaaacaataacttatttcttagttaaaagacgatatttgccttctaccttaataatttgaactaatttaattgtcaaacatcattatattcattattttttaaataatctatacgactattttttcaaaaatatattggtccttattattcatattgagttagttattgtatgtaattattcctttttctttgacaatgttaatattggaaaaatgttatataagtttcttgatttaataggtaataaattctcaataaaaatttatatatcacatgaaggacctatggaaaaaaattagtaacaacaaatatctagtactatcaacagacacatcactgtgtctttatcaaaatttaataaatccatcagtatctatcttttaaattttttagacgacaatttttttgattaatctttaataatctttgcaactgaacaaagcagattttacttagtcgttaaaatcattaggaataagaataataatacttcaaaaaagatacattgcattcctaaataaaaaaataactaaaaaactattatacagttcttgcaggcccttcatattttaggaaaatttctaactctaatcacaaattataatattactttaaagaagcttataattttcttaccagtacaatatgtatgtaagcaaaagcacctagctaacaattttactaaaagtcgaatatataaaaacttttaagatgattgcatagttctgaagcatcttaaaaagattatttactgaattaatgtgaactcattaaagttctatgttatgtctggaaattttgggatgatatcttttgtttctaatcgaaaaaaacaacaactaattaattattataatcccctaattatttcagaaaatttatataggtaaaaaactgtggtaaacatgcctgctgagttcaattgaataaataaattatgatagaaataattgttttcctatggtctaactaatatgcaaaaaaatatatatttgattcacacaaacatatgacaattaaatcttttgtatttctaagctatttagatttttcgaaaagaatttttcaaatctttcagtatgcactatacatataccatatgccagttacaaaccatatgaaattacttcaataaatataaatattcttatttatacaggaattgtgataaaaattccattcaaaataatttttggttctttaaaaaactcaagttatttcgaaataatacaatgtgactatttttggaagattttaacatatattaagaagaatttatatagaagaatcaaattgaacctctattagaaaaagaaataatgtgtctataaaagaaacgataaacgaacaccaccagttattatttaccataacgaactctctttcataccaaaattaaaagttttctttcttcaaaaatataattagtatattttcacaaggtattatcttatacaattaaaatgatcagaaataatcaatcccgatttaattgtctactaaacattttttcttaaagatataccaatataaattgtaattgttgataactgtatcttcgactaagtactatctcattatattgttaacttatgatacatagacaccatcaaaataacagatattgaaattcaggaaaatgagtatattcactaatatatagaaacgtgacatacatcgcaagaagacaacatcagtgttctcctctagatttagttaaaacattatttaatacattattcgtgttaactgccgaagctatgtgtgtttttggaaacactaattctgcattcttttttcgaacaatacatgttactttcttcaattagcctacttatttttgattagtagggggttatttaaatttctctcattttaatggttgttcattttagaaaatgaaaaattatgtttatttactattttgagaagtaggaactctcattggctcttttactgcggacttagtttttagggaggtaaagaaaccagcaaatatcctataaaagaaaagaagtgaataaataacattgtcaattcaatttattagaaagaatataaggaaacccctaggttctattatgaatcaaaaccaaaattcaaacttttaaaatgttttctcaaattaccaaacctcaaaatagtaaattgttaacatatataattggcgctactgcaacattcgcagtagcaactaccgcataccattatacctcatcaaaaaaaacctctttctccattattagtaatgaaagtcctaaagtatttattggtgacaataaatggattgatctacctttgctaaaagttgaggaacaatctcatgatactaaactgttcacctttaaattacctacggatgactcagtgacaggcctaactttagcttctgccgtattaaccaaatttttcaacgaagaaactggcaaaaatgttattagaccttacacaccagtgagtgacttaaatatggaaggttcttttcaattaattattaaacattatccaggcggtccaatgacaaaccatattttcaaactaaagcctaatgatactctttcgtttaaaggcccaattaagaaatgggattgggttccaaattcctttgaaagaatcactttgctaggtgcgggtaccggtattacacctctattccaattagctcgccacatagttgagaatccaaatgacaatacaaaagtggatttaatatatggtaacaaaacaccaaatgatattttattgaaacatgaattggacgccttgcataaaaaatatcctgacaaatttaatgtttcatattttgtggactccaaagaaagtaatttagattcagattccaaacttcatttagggtttatttcaaaggaattcttaaaaacaaacattgcaaaagctactgaaaaaacacatgtatttgtttgtggaccaccaccttttatgaaggcattttcaggtgaaaaagtatctccaaaagatcagggtgaattgattggaattttaaaggagctgggatatacaaaagaacaagtgttcaaattttgattaataaaactaaattggtccgttaaattctgttccttttttgtctatataaacatatgactgtactcttttgtcctatatatctgttatttaccctttatacaaaatattattggtttaaaaaatttttctcaaaataattcgtttgttcctgttctcttctttgaatacccttggtgtatgtcggaactttgtaaaggttggcttcatatttcccgtatgtgtgtaaaacgtttgtttctgacaaaagggagtatgaatcttttttaattatattattggttagctcttttaaggagcttttgtttgtttgaacatactttaaagccttgataaattcttcgtcccaatacagatttaacatgtcaccatttgtaggttcttgcgaagatatatgcattttgtcttgttcaacctcaataacgtctatccattgtcttctaggtgcacatttatcaagtgctaaaaaattagttactgaagtttgacaattacatcttattaggttttcactctgtgttttatcaaaattttcatcttcatcagaaagttctaagtcaatctcattttcattttttttagtagaaagactatttttctcttgcaattcatgctgtactgtagctctatattttacatgcagatgtgcactaagccaccatttgggtttcagtctacacaataagtcccaatttacggggcttccaagttggtggttgttaatatcttttctaaagtatggtttatattttaataatcgttgtatatccccatggtatacaatttcgtttggccaatcatgacttatcatgatgtctatccctctctcgttatttaataaatagaaaggtaaaacatctatacgttttacacagtataatgtttttatattgagttttggatgccctataccattatttaactgtcgtagttctacatctttccaactgagtctcggggtttcaaagacccaatctttgaaaattccactaatagaggcaattctcacacctttaaaccatatgacattactataacctaaataatacatatttggagcaacatatcctccataaggtaattccatcaaatgtttcattgattcatgatttccactgataaatataactggaactggaaccttacaggtatcattaaaataatatttatgaaaatcacccatttttcgatatttcaaaggtacactaatgtaattcatatcctctttagttctaatactttgaaaatcgcctaaaataattaaaagatcaaggggcttcaaagaatgaagctgcctaactttttgaaatacagtatcaagctctccatggcaacaaccttgtacagcaattcgtatctttgtcatattatccctgttgtaatacaaattagcgtactaataatacatattcgaatgaagaataattttgaatatgcactggatatttaatcatcaaaatttcacagtgaagtaaaaataattgaaatataatattctcgatctgataaaaaagatttttgtctttttaaaacggatgagatggatacaaaaaataagtcatgcttaattattatattaaaaaaatgaaaaaaaaaaaaaaaaaaaaaagaaaggggaaatatacaaaatataatgttatataatatctgaacaattactttttgcctagggatcccgtcaaatttactgtataaaagtccaatattcaaattattattaaacataaatttattttacaataacatggttgttgtaatattttataatgtaatatatatcatatataaaaaccataactattgatttaacaagaatattataaaattgttccattcgataataatacaccaattttggaaatttcaaataaattttgtacaataataaacaacttttataggaataaatgttagtataaaaaaagtaatccaaagattgaagtttcttggtaattcgcactttttggttgttacttattaagcagcataggcagtaatatgttttaatcattgcagtaattttgtattaataataaaggatgtgtttttttggatgtctttaactttaaaataaaacaaactcttcaaatatcagaaaataaagtatatatgtttgttctaatataatacaaactgtaattttaatgatattttgttagattttttagttttcctgtctttttatcatatatgaacatattagaatacattttacctatacttatattattattttctgtgttttataaaatatttctaaactatagttattgtttgcatacttgtaataactatactttttttacttgttttaaaaaagaaatatgaaaacctataaaatataatatatttttgctttttctttttattgataattatttatttatattattatcatgttattatagagaatccaacgggggatcaataaatacacaatcttactttcaatatttgtgcctaggtgaaaaattcgtacaaccatagatataatgatttttataagatattaaatttggttataagatttaaagtaatcatcaatataccagaacttacataagaaatcttctattacaatttataagatgtggagtaatagtctatctactataatactaccattgattgaattaggtctttgatttattaaaaatctatataagtaatatacctaattatatgaatcattttaatttcctttttctagcattttgtatttttctagagaaataatactgtaaaaaaatatttaataacatcttcatatataaactttaaataatataatagataagaaaaaaaataaaaatctatacttttcatacattatcaaaatgttattcagtattatcctaaacatcattgagtttaatcaacactcagattcttacatacaaaatactatttttcctcgtacaatatgttaatacatgatattattcttttttacttgtaatattgtttgtctttattcaccaataaattttaatcatttgttacgataaataaatattataaaagcacatgatatttttaaaaaaactattaaacatatgtttttattttttaaaaatttatttatttttaaattccatatagaaacaattattttaatatacgtataaaattatttattgaattttttagaatgtgatatagtatatattatatactctcatcttttacgaaataaaatattttacttgaaacataaatgaacattataaaataagtgttttgctatgatgtatgatgaaagttgcacttttcttatcctttcacaaaaaataaaaataggcaaaatattgttcataaaagaaactttacattattttagttcccaaaaaaatacgattgaatgtcatatgatacactttaaaaaagtttatatataatttaataaatattttactctttcataattttgtttaaaagtcataatatctgttgtttagttacttaataaaatttctaataatgggtagttaagagggaattatttacttatattggaatgatcaacataaaagtcgaatcaatctataacactgaaatatatttgaaaatactactcatgttatttctcctttggccttccactgctgtaaagtgctttttccttttcataagtattatggtaaggtttaattcatatagaaaaagaaatcagtttttttccttatagaatatagaatgtgacagataaactaaatttttttattaatgcactatgattcaatattgctcaaacagtacactttctattcacatttttaaagactcctaaaaatgttcactgtaaagttgttagaaaaatattggaatatgtttgtagtctaggaatttaggaatatagacataaacaataaaaaagaatcctagattttcagatgtttttttatagatattgtcttaatgaatattccacctaaaaaaatgtaatcttgtatgtctttagactaattgtttaattatttgtaaatgtgtgattatgtataagaaatcctatttggaaatcctgaaatacgtagtctgcagataacgttgaatgtcaaggtgaaggacttagagcagttgaaactctggacccaaagttgtgagtgtatctgaaagaacaaacgattgtcggataaacatcagtgacaaattactgagaagtttatttaaggcatttttgattattgaaaaatggtttcagaggtaattaaacatttgtattttatctaataggtttcatctaggaaaataaaacaagtaataagaaaacaagaactaatgtattcattaattagaattaatcagttatatactaaatatccatattttaatgtgttactagtgacaacccttatattatatctggacaattacttttctatcataaatcgtgataacagttttatactttgtgaaaaaaaatacatctctcagtaaaaaagaaaactttttttaaatgtaaaggaactaaagaaagaaataagaaacagatttaagataattaatatatatgtgttatacaaaattatattatattttgtttgattttatttttaagatatcacaggggaaagtttacatagatttttttcctctactattacacacagttattttttattttgaccaagacaaatgttatcagtattttacactagatacatagagaatattctatatcacaaataaagaaaaatacaacaatatataataatataaataggcagcaaaatagtaatatattctaataatttccgcattctaattgtaattttttttataattcttaaagatttatccgatcacaacaaatacaaaaaataaattaaaatacttcaaaaaattttgtttttagatagaagtaaaacaaaaatattctttacaaatgaatttatatcaacacttaatattacacttataggtttatacactattacccacaatttataaaaaattatattgtctaaatgatatcatttatgcgtttcaatatgtcaccccattataacaatcgataagacccaaacaggtaaatataaaaaatctcgtgctttatttaattcaaatattaactatatttgtgttggaagtacaaacatttatactttatttagcttttttcctgcttctatttagaattctattgtttatgtttctttcgtggtgtcaatatggttaccacagaacccctctctaataagtttaccttagaattttgttttcgtgctaaaaccttttcactacctaccaattttaataatttcatgtttaaattagaagatagatatttagaaacattaaaatacgattctattgctccttcttcagtgtcatattcttcggcactaatataatttttcaaaaaatgaaattgcttcaaagatgaagttacgatgacatcttcaccttgaataggcgaataactagatgtttctacagtatatccttcaactccaattactgataccaatacacttaacttaaattcttgtctttcttgtaattcaaaccaaaaagtcctcaaattggtatctaatattctattttcctccaccaactgatgtaaaaatctggatttaggatcatctggaaataatggaatgcaaaacgctgctaaagaattaagatcatcactaaatatatcaccagatttccaattacgatacctgcatccaacaaagtgttttccgacccttaatacatcctccccaggaatctttaagcatgctttaagtttatttgatctatcaaatttctcctcaacaagattgtcaataatatgcaaccaccacttcatcaactgcataccattaagtatatgttttcctctattgcttgaggaccctggaaatagatattgatctgctggtcttgtgaatagacatattttagttataaatttacctgcaaatgagatatttaagaaatatatatcctgatcgagaatatgacaagtattatccaaagctttcttagaaagctttttcaaattgttttgtattttatctttaccgataataaaattttttttatcctcttttttgtactttcttttcaaaggcttcactcttaataaataatagttaggatcaattttcaagatatattctaaaattactctggtaacatctttagtgctaaaacgtacatcagaatatccatttgtatctgcctttgaaataaaaatcagtctttcagcaggaggctgtatcttttgatattttttatctgtgtcattctgaacagttatgtaaacaaatatttccaaagcatatacaaatttttttttacaggatagtgcaataaaatgttgagttttaacagtccgtgaatccggattttcttttgaaccagttattttactctttggtgtaatgattggcactatttcacatgggttactttgtaaatgaaatatctcaaagtcaccgttttttggcaacacattatttaacaaactctgaagtgtcatacaatcttgtttttctatattttgcaatatattgatgattaagctttaattctttataaacttgagcatgaggaattgtttaatcccaatctagaaaaagttgaaaaatcaaatagtagagaatgacagaacttttgctttacaggtatgtttcttttcaatttgtatgggattcaccatccactatacctagtatcgttcatatgtactttgatattcgaagttttggctaaaaaattcccggtttatttttgcttatttttttgtatctacctatctaattctgaaaaatagttaagggtaaaatcaatcaataaaaatataaaaagaagaagtaacagatgaaacaaaaattccgtctttcaggtaatgtaactcttcacagacgatttcaagcaagaaatagaataaagctctttgtatattacggcctgttaccaaaaagttacagttgcaagtaatctcaatgacagaacctagtaatgcgtcacataaaacacccataaaacaagatatttctaataccaacgagaatagtcaagattgtgatattttatcaatcagaaacaataaatctaaaacaaaatatattctagaagtaagggtctccgatcctcaaaaaatacatggtgatcgtggatcatctggatcatatgtgagctaccagatatcaactaagacaaataatccttcttatcacacttctaattttaaaaacaatcaggacaccaccaaagtggattatgatatggacaaaattattgttgtgcatagaagatatagtgatttactattattacaggaaatattatacaatgaccatcccacctgtataattccaccgttgccagacaagaaagttttccaatatattgcaggtgatagatttagtcaacgattcactcaaaaaagatgccacagtcttcaaaaatttttaagacgtattgcatgccatccaattctatctgaatcaaatgttttacgaatgtttttgacgagtgatgattgggaagcatacaaaaaaaatttggccaaagtgttacctagtactaaggaagaagttacagattcattcatgaatgctttcaaatcggttcataatcagagtgaagaatttgttgaggttaaggaaaaaaatgacaggttgaaccacactattatcaagttagataaaatttttcataagattatcaaaaaaaatgatttcatatctgaggattttagtaaattgggaacaaatttacaggagttgaatgatctaattaaacgcaatcaagagtccggagaatgtaacataaatgatagtaatgatgaaaagttgtcacaaaatttaaaaagttttacgaatggaattattcaattatcctatggattaagtgatttgaacaaatatctagattatgaatatgtagttgatttaaaaagtttagaacattttattgacagtatgaggcaattggtaaaattgaaagatcaaaaacaaattgattatgaagaattaaatgagtatttaaccaaagcagttaaaatgagagataatttaatatccgggtatggtggaacgaatttttttactaacaaattagaagagatggcaggcattaatcaagaatctgtgcgccgtgaaaaaattaataagttggaaaataaaatcaattctctaaataatgaattagaaagtgctaaaaaaatagcagatgcattcgaaaaagaaacattaaaagaaatcaaattattcgaggaaacaaaaacaaaggagctaaaggaatcacttggaagccttgcagataatcacataaaattctatgaaaaaatgctagaaacatggaccgaaattgatgcaaatttaaaataatagcctataataaaacttattttgatttgcaatatttatttaggtgcaaaaggtttgcatagtcacaaaactaaatgattgtttcatacctgaccaaataaaattttatgatattgctatttaatacataaataaatagatgacaaaaagaaaagttacgtctatatctaaatgttggttatttgtttttcatatgacatttagaatatacgtgtagtttgtcattgtaaaacaagacgatcaatatcattctatattttcagtttcttattttccttctgtttaaattgctttatttccttttttatgtcccttacaatagagtcataatgtgaatcaattaaatcccaatcaatacttttataatcttctaaatcagtcattgaatcataatttctcaaattatttaaaccaaattcttgaccaaataattttctatccatatattgagaccaattaatgtttggaaagttttttgtatctaaatttctatccagtttagctctaggatttggagatcttttattctctttaacataaaaatatcttaataacattatggcttcacgtctatataggccgggaatagatttttgttgaaaaatggaaccgtcatatcccaatgttgacatattgttatttatagacagtacagtaccattacccccgaatcgatcgttgccacaaccgtagtagattttatgtatacgtagttgttttaatgcagatgcgcacattatacatggttccacagtcacataaacaatgcagtttgaacaaaactcagcaaaccctttatgatcattggagaatctcaatttaatttgttctatagccataaattctgcatgggcaataccattcaacgaattatttgtatcgttcataccatatgctacgatttgatttgttattttatctacaaatatacatgctacaggtgtttcacctttatctaatgcatattttgcaagtttaaccgctgtagccatgtgttctttatgtgtcattattgtttcccatgtcattgtaagtttttacagttcgtcttctttcctattttaatattcaagttccagtttattacaagcctctgccaaggaaatgttgtccttaaaacgcatatattaaaagaggtttatttactgtataaataatatcatctccaagataaggactaaatgtggaaaagaagaaatttatgcatatatgtcaattttctactaacaaaataatgcttgataattaaagaatctctattccttaaccctccgcttttttagtttttttttttattatttatttattttctttttcttttcaacagaaaaagaaagctgtgttctatactactaacttttaacaagaacaacaccgaaaagcctcagacactcctgtatatattattctattcgttcagttatataccccgtatggcttggagatctagcaaaaagacaaaagtctatagcttctggtagaaccatacacgtatgctcacatatgcccgcttgttgttattataacgtgtcattattttcctttttgtctcccgttttcttttttctagaagtttcttgtcgcttaacacgaggtattttgtgtcgaatttgagatttcaggaatttcttttcgtttcttttcgtttcttttcgtttctttttttttgtctttgtctttgtttttgttcccttgaaaaaaaaaatgatgagttgttcaaaaagaaaaaaaaaattaatttgtactttttttttttggtacacgaaaaattttgtgcaatcgaacacaaacacaaacacacaaacgtatttatttatatacatatatatatatatatatatatacaggaaaacacgtccttaaccacaattagtacgacaattgagaattatcccgtttcctagcctctttcttggacgaagttttttttttttccacaaacatccttgtttcttttctaaaacgtttcgactcgtgagcctctttttacttaatctttccatccttttacttttgtaatccttttcatataagacttgatgaattggatatacttgttttattgaattcgattacatagtacacacagaaattgaagaagaagataaaatagataaagaaaataaaaaagaaaaacgataaaaaacatagtatatattaatataaaaagaaaaaagaatataaatatgttttttaataggacacacacttcgaaatggctggttccattatcagtcctttgctatgtattatttttggtggttcttcccctaaatggtggtaataagacttctaacttcttagtacgtgcagatgacgctactaattatggaactgttattggtattgatttgggtaccacgtattcttgtgttgcagttatgaaaaatggtaagaccgagattttggctaacgaacaaggtaatagaattacaccatcctacgttgcatttaccgacgaagaaagacttattggtgatgcagcaaagaatcaaattgcttcaaatcctcataacactgtttttgacatcaaaagattaattgggttgaaatataatgatagatctgtccaaagagatatcaaacatttaccattcaaagttgttaataaggatggtaaaccagctgttgaagtcactgtcaaaggtgaaaagaaagtgtttaccccggaagaaatctctggtatgattttaggtaaaatgaaacagattgctgaggactatctaggacacaaagtcactcatgctgttgttactgtgccagcatactttaatgatgcccaaagacaagctactaaggatgctggtaccattgctggtctaaacattttaagaattgttaacgaaccaacagcagcagcaattgcatacggtttagataaggataagaaagaacaccaaattattgtttatgacttaggtggtggtacttttgatgtttccttattatctattgaaaatggtgtctttgaagtacaagctacttctggtgatacacacttaggtggtgaagatttcgattataagattgtccgtcaattgatcaaagtctttaagaagaaacatggtattgatgtaagtgataataataaagctttggccaagttaaagagagaagctgaaaaggctaaacgtgctttatctagccaaatgtccacacgtattgaaattgattcttttgtggatggtattgacttaagtgaaactttaacaagagctaaatttgaagagttaaacttggatcttttcaaaaagactttaaaacctgtccaaaaagtattggaagatgctggtttagataagaaggatattgatgatattgtacttgttggtggttctactagaatccccaaggttcaacaattattagaaagttacttcggtggtaaaaaggcatctaaaggtatcaatcctgacgaagctgttgcttatggtgcagctgttcaagcaggtgttctatctggtgaagaaggtgttgaagatatcgtcttattagatgttaatgctttgactttgggtatcgaaactaccggtggtgtcatgactccattaattaagagaaatacagctatcccaactaagaagtcacaaattttctctactgctgttgataatcaaccaacagttatgattcaagtttttgagggtgaaagagcaatgtctaaagacaacaatttgttaggtaaatttgaattaactggtattcctcctgctccaagaggtgttcctcaaatcgaagttaccttcgctttagatgctaatggtattttaaccgtctccgcaactgacaaaggtactggtaaatctgaatctattacaatcactaacgacaaaggtagattgtctaaagaagagattgaaagaatggtcgaagaagctgaaaaatatgcctctgaggatgcaagtttcaaagccaaggtcgaagctagaaacaagttagaaaactatgctcattctttaaagaatcaagttaatggagaattaagtgacaaattagaagaagatgataaaactacattactagatgctgtcagtgacgttctagaatggttggatgacaactttgacactgctcttgcagaagactttgaggagaaattcgaaggattatccaaagttgcattcccaataacttctaaattatatggtgccaacggtgagggtgcatcttctggcgtctatgatgaagatgaggatgaagatgatgacagtgattacttcgaacatgatgaattgtgattactcctcttatggttgtcaaattcaagcctcttacaacaaaactccgtaaatatctaacagtttagatatactagaagtaacttcttgctatataggaatttcatacatttgttaatatagaatgttttaaaatcatcattataataacatgtttcataatattttttcggtctatgtgatgtgcctattactgtgatacgcgatttattcacgaatcgcaatatttctttttcttttgaattttcacttgaagaaaaataagacttaaaaattttttttattgtaattttttttttccatcaggtaaaaaaaatcgatgagataaactttggtacttctgtataagagtttgtgagactctacagtacactatgttactctcacaatatccacttatataggttatagttggagacactatatcacaaaagttgttaaaaatggcaagaaaagggaaactaacaactgctcaacgtaagcaacagcgtaaggaagaagatagatatatccaagatttaattacaaggactcaggaatacgatccgaaaacctcaaaagctaccttttttaaagatttaccaattagtaaaaatgtactgaaaggcttaaaccaatctgcatttgtgaaaatgacagatattcaaaaggaagctattcctgtagctttgaaaggttatgatgtgctaggtgctgctaaaacaggttctgggaaaactttggcttttttagtgccaattttagaaaaattatatcgtgaaaaatggactgagtttgatggtcttggtgcgttggtcatatctccaactagagaattagcaatgcaaatttatgaagtcttaacaaagattggtgctcatatgtcattttctgctgggctggttattggtggtaaagatgtgaaatttgaatctgagagaatttcgaaaattaatattttaatcgggactccagggagaattttacaacatatggatcaagcaattggtttgacaacctctaatcttcaaatgcttgttttggacgaggcagatagatgtctcgacatggggttcaaaaatactctagatgctattgttagtaatttacctcttacaagacaaactcttttgttttcagctacacaaccaaactccctttcagaattggcaagattgtctttaacagattacaaaatggtaggtaccttagatactgtaagtaatggttccataggggcagctacgccttctactttacaacaatcatttattgaagttgcattaccggataaattagatatactattcagtttcattaaatcccatttaaagtcgaagatgattgtattcttgtccagttcaaaacaggtacattttgtttatgaaacatttagaaaaatgcaaccaggtatttcactgttacatcttcatggcagacagaaacaaacagcaagaacagaaactcttgataagttcagtcgtgctcaacaggtatgtctatttgcaacagatgttgttgcaaggggtattgattttccagcagttgactgggttgttcaagttgactgtcctgaagacacagatacatatattcatagggtaggcagatctgctcgttacgggaaaaacggtaagtcacttatcatgttaactcctcaagaatgtaatgtattcttatcaagattaaagaataagaatatagagccaaataaattaactattaaacaatctaaaaagaagtctatcaaatcacaattacaatcattactattcaaagatccagaattaaagtacctagcccaaaaggcttttatttcttatattagatccgtatatattcaaaaagataaagaagtctttagatttgacgaattaccaacagaagagttcgcacattcactaggtcttcctggtgctccaaaaattaaaatcaagggtatgaaggccattgaacgtgctaagaaattaaagaatacttcaagatctctattatctttagctaatacaaacgaagatggagaacttgaaaaggatactaaagttgttagaacaaaaattgataaaatgtttgaacgtaaaaatcaaactgtgctaagtgaacattatttaaacattaccaagtctaccgcaaatgatgaagatgaagatgattttatgcagattaaacgtgttgatcatgcactaaatgaggaagaacttcctgatttgactgcaccaatctctaaaagagcacaaagaagagctttatctaaaaaagcttccatttcaacaaaaggaaatgctacaaaactcgtatttgatgatgacggtgtttctcatccagtttatgaactagaaggtgaggaagacttccacaagaggggaacagcagaagaacaaaagaaagagtttatcattaaggagtccgaagtaatgtccaaaatggatgtaatcgataagcagatagctaaggaaaaaaagcaggagagaaagagaaaaagattagaggctatgagaaaagagatggaaagagaaatggcaaatgaatcagactatgaagaaccagtggtctatttaggtactggtaatttgagtgatgatatgcatgattatgattcggatgaagagcagaaatttaagagacctaggatcactgaatctgtggctgaatcagattctgcctctgatgataacaacgatattattgaggtaacagaacctcaaactttggaagatttagagtctttgacttccagattaattcaaggctgacctgagcaatagagtagtttctttcgttatctacatatttatagacgtgcattatataaaatattttcaaaatttaaattgatcaaaaacacttcgaaaattaagacactcacacccaatgatagaacctaatatatctacttattagcttgtacggatagttcaagattacctctaacaaaatccttccatattgaatcttgaattctttttagatttgtttcatatcgagtaatattcttcaaattccacttatacacaaacaaatcattttctcctgttgtattaacttccctccatatttgaaaggattgccaatgttctttccataaattgatatcccagggagccccttttaaagaaaaagtaaatgcccatactaatggatttttattttgagaggtcaatcttgcatatgtagtaacataatcgtttgatgaagttattggtaccaccagtagtttaaaaaaggccagtaacacgtctagatttttttctatatgtttttgtgtccacttataagatgacttagtatttgaattagaattgactatgttctcagccaatagatttagtatactccgtaataattcaatatctaataacaattgttctccaatattaacaacctgtttgatatcaaaagatcgtcttttacttaactcaccaaaaggtggaaggggttgcaaaagtcttacaacacattcaacatatgtagatgttaaggaatcgatgaaattattcaaaaaattccatttgtatacatctctgttcaataatgtgatggtttcttgtagacaactcttatatggttcattacttgagggatttgaaaaagttagtattttcttcaatgttaccatatatctactgtaatcttcaacagtaatatgagcccaatcagtattatcaaactctttagttacaaaagataaatccatgtgaatagtttttttaagaagaaaactattacactttgaaagtagctcatcataaaaatctttagctttaataaaaggatcagaaacacctcttgcattagaactaaatatagataatttttcttctagctgatcaatagtggttgaacaataatcacaagtatttactaacaatactgtatatttgattatattatgctgttcctttgaaactgagtcatctacaacatataaaggttttaaaattttgtttaaatattctgtcagccattttgcaaaaaaatttgatagagatattaaaatagattcatttttactttcgcctaccaactctaaagtttctgttaggatatttctgtatgttctgaaaaggtctgcacttgaaggaactactaaagagtccgaagagtctgaaggcatcttgacttcactcatataagacagtagtttcttttccataatctcatcttgatgcgatacccataatgataaatatggttcaaattgactgcttaacttctcctctttacatttattagagaatcttacatcaatatatttttcaaaatctaaagttacttgtaaggactgcataaataagtcaatagatggttttttgtatccaaattctctgtgtaataaaacttttaaatcttttctagtcatttggtaaaatctatttgtcaattgtaatggaagttcccatgaaggtgagaagtaggaagcatgttttgaattaaaattgtttaatagttttttgaaaaaaataaaacgcctggataaattttctaaagaacctgcttcatcatctaactgaaatatttctttcaattcatataagatcctttccagtaaccaatcaataatttccttttttgtgttttcttcagagtttatcaattcacatgcgccatctcttgactgtttttctagagtttcatttatttgtacattagtatcaagtacctgtataaacaatttttttatatttttattaatatttgatttcaaaatccatatagaaataagcattttattgaccacgtcaacagatttaaatggaccgaatgtgttttctgttaacgaacacataattttatatggagaaaccatttctatatatgccgatttttgtagcaattgtttgcattcaaaataattatctactaatattttgaaattttgaaaaaacttcaaagtttggagtaaattatgctttgcattatctaaatgagaaattccctcagttaatgttttaattgtagtttctgtttttttagctttgtccttagtttttttatacttgatcaatgcgttgttaagtatagtagtttctgaaaattcagttgtatgatcttggaaggatgatatagtcttattctgctttataatatcgtttaaatgatttttgtatttattggtcagcaatattgtattgttaatattatctaatgaggtcttattcaaaaagattgaagcgatgtcatccaagggtttataatcaattgtagagagattcatgcttaaaatttctaatttataattggtgacctatgccattatctgacagcaaagaaagtatgttatatacttgtattatttcagatgttttttgtactcctttgcaacttttaagttttaggcataattttatcctttattttatataattgacagtttaggtgaaacatgcttatgcttcttactttttttttttcagagatatttagtgaaaaccaatgcggaattgttagtcttaaggcgaagttacttttccggataaaaaagcatctctttcaaaaacttgttgatctaatttatacctatgtaacaatacttcactaatctttgcttaatgaatttcgtagaaagataatagtgtttctacaatttgttaccaaattactagagaaactacgtacttataaagatagtcatatgttatatattatactgttcttatagtgtcgataaatagtgtaattcggatatctttcagataatatgatactttaagattattatcaactttgaaatttagcaaacatgataaatcttttatctatactttattagatatgtctaccaaattgtattaataagttacaattggaattttaccatgatttaatgaagtatattcagactcactttgtttgaattaaactctattttcagaagtcttctgtaattacttttacactaaaataaattaacacagctttgtatatttatttattgtatattataatgcaagaaagcttttttcttttcttttttttatgaatgattgatcaatataattatataaactaaagctttgtttttttacatatcgattgttcgcaaaacagaagtgtattattggtatgtcgccatagaggaagaaacgatgttttcaaattttcaatctgtaattttattcactttatttagaaagtaatataattaaagtagtaatatccaataatatattctggttttactatatttatgatcaatctataccattactagtcgttgtataaaatttgaacacattcgatttctgaacttttgctttcatgatttctaaaaagtcgtgagattatgctaggattaaaattttttatttagtctttaaattcaaatatatccttgattaacgtatatagttatatgcatgtgttagtgggcaagctattagatgaaaataaaatttcttcttacaatgtcctgtttttaaaaatacagaaagtatgtaattcactttcacataaagttgtttttttttttttttttttttttttttttttttgacttttatttaacaaagaacctagttgtattgtatcagctctctgagcagacttaaaataagctaaactatataaaacacatgaatcattatatttggatgtaaattttttaatatatttatgtacttataagttaattcacactagtccttaacacatatattagatatttttttcaccataatagccggtcattgaacataataatacaattagcttaattaactcccctggagactgttcttgtcttatagtctctgtttcctctagagtgtcatatttaaatacacttattaatagcttctcgaaagaagccaataatactcttacagatctgatcacttcgtaattttggttgcctgcatttattaatataacaactaacaattgaaagattggaataagtagttcttttaaagaaatattattattagaatatattcttagttttctttcatccagagtaatttccacaatacctgatttctgcaaggatttattctctgctataacccttagtcctaaatcaggatctacttgcaaaaatttgatctctcctattactttgagaagcttattttgaatgatacatttgacaccattttttgtttcagaaatatgcaaaagaagataaataatagctttaaaagcagtaatttcatgtaggaagttatcaatctcaattggctccgcttttgaacccattaaaacatcgacattctttaatgtacaaataattaaatgaagttgactattctttattaaggaatctacaataatattttctttattggacttagcaactttaatcaatgaatctaataaaaataatgcagtaatacgactcgtaccctccccgtaaataatatcattacaaataacttccacaaatctttcactctgaactcttagactctgtaaaatatcacctgcaaatgtttgatcgtttaacaccctaattaaatattggttagcaagaacataaaagtcagctcttaaaggtatggatgataatggcgatgtgatgccatgaatacagactttgaataagttttgcaggcgaccatctaataagtctttttgattaattgtaagacgatcttgattatagatatcatacaaaaatactactaatgatactagatcttcggataaacgaatatcaaactcgacataatcattaattttgggaattatgatgctaaatatttcgaggataaagtttgaacgtttcagtggtcccaattttccatcagaaaccaatatttgaaccaactgagcccatgagtgcaaaatggaaaattgcagatcgtttagctttgaatcactaacaaaagtaataatatgctgtcttaggtttctataactttcattgtatataccagtatttttttcctctttatttgttgatgttaagttagattttgtagaagatagttgttgtgattgatttcccaaggacaacagtctgtctatgttgtccatttcaaatacattctcattacacctttttgctaatttgattgttgttaaatcgattgataattcagataggtatgaatcaacaccagctaaatttctatcaattttaatattcttataacctagactatttaaaaaggaaaatattttggctgaatacattgtgttagaaattaataaatcaatataggaaagaagttgtgaactagtaccaaaagatgacactctatggataaataaacttaaatattgaatcaaataatttctgtaacttaaaaatgagaataacgcaccgatagatggcgaattaataaatttattggcaaaatcaacagaagaaggttggaataattgactctcccatctagtgtactttgtaatagataaatcaacacctacaatagtttcaaagaaaccatattgtaataatacatctaaaacaattcgtgaagttgttggattacgacatagctttagcaatatttccatgcaaatgcatgccaatctcattggagcataacttacgttagcagagtctatttcttctaatgatgtttgtaggacatataagatagtcctaaataatgaagttccagatgcaataaatgtgggaaaattaggaccaagagataatatgttagatacatgaaaacccaaaagaaaatgtgatacagtaattgacgagtcagtataagataaattgtggtttaaaaattccaaaatttcaatcttcatatttagtgcatcttctgagtcaatggtagattctaattggaaaataaatgagtcctttattttggcagattcatcaactgcatccagcattaccaacaatttgctttgattatatacttgggatgacttatatgtgtatttcatagcaattttattgaggatggcaactgatttagatgagatactataatttttatatccaacataaagtcccaaatgagcaattatatctaagttaaaaaaaactgcatcgtagaaagaacgtaacccgtgtgtaccaaattctttaggaagtacataatctgtattgtgatacttttttacaattggaactaattcttcaatataggtatcttggaattctaaaatattgtatatgatatttaacacataatctattaatttcattgatgaatatggtacgttagattcaaaaaatgaatctcctttatcggatcgaagaatatcaaataatcccttatatactgattcctctaataaataatttaagacaacagtagcaggagattcttgaacataggtaaaaaaatctgatgtaacaactaacttgtcaaggttaatatttatggtagaggagttcataataatataattgtcaaatgattccagtgcatatttaaatgtttctaaaataggaagcagaataccctctttataggttttatctattatttttaaagaaggaacaaaaatttgatgtattataaaatcaaaatatggaacaataccaacttttctataaccatgacccaattttactggaaattctaacttaccaaacgaattatcatcactttgattattttggattagttttctaaacaagtgtaaaaacccgagaatctcagtaaaatttgtaaaagtagacgagaatggagcaatgtatgaagttgtataattattaatttttgatcttttaaatatcatggagtccaaagcaaaccaaaattttgctttctcctttgtttctcttggagtcaaattactcaaggtcttaaggcatgcgcctattagaggtgtatccagtctagaaaattcaaataatttgtcaataaataaagatgctaaagatgatctaatggaattatcgacgttatgtgctaccgaactaattaatgttaatagagatgataacaatatatttgattcctcattcagacctacttcaagggctagtgtcaaagaatctatctcagctgattctaagttttggttcctttgctgttctaaattattaaacttgttgattttttcaatataatctgtaaaatactgaacaattattttccaagatattatattattgtcaccgaaataattaaatatctgtgttgcattgtcataaccatgtgaaagacttgatatcaacaaataaaaacatgatctcataagactatccgaacatttggctgcccattcaataaatccataggaattagattctttattctctaaaaactcctttgagtattctggtcttaaagtatagaagaaatatagtgcaataaaaaacctttccaactcagctttttcacaaataatatctaaatctagatcttcactagaaagtaatgagtcctcttcagcatccttaatctttgttaaaaggaatgcacaatcactgataattgtttgaagtacattatgggtactaaataaaaagaaagaatccatttgttccgacaactgaatgttttcaggagagtattgattggctgttatatcaaccttagaaaatatattatttactgttgtagtatttgctaatggtttatttatatttatgtcagtgtggtttatattcattatctcattttgtttgaaacttttatcataataactttcatcatctaataattgttttggaattaattttggaatatgtctttgcaaaaggcttctaatatcgtagtacagatcaatactcttatctttttcaattaaagaagtgtctgctgtaatggttaacagttgttcaaaagcaccgtattcaacagccaatctcataggttcatcaatatcggttttaaaatctaatgatttcgttctttcattaggttttgctttacaccatgaaataaaaaatgtcaaaaatacaaaaatcaataaaactttgattggctttaaggaaatatcatcatcggattttaaatctttcacaaatagtaaatacagatctttaacttccgattctttgctaaaagtttctaaattattgaatgctaagaataacgccggtaagtagtagattgtgaaataatcgttgacatctaattttacaacatgttctattatatttagtatagattgtttatctaaaaagcatcctaatttgattaaaccatatagaatttgtccaagaatatcatattcttttaataaaaattctcttctgaacttaatagtttgattaaaaaggatgccattctgctctaaaatttgtgctcgattaatcatttgtttaatatcatttaactgacaatgaattgatgtaaatgcaggtaagatattggatagtagagttgatttggaatcactgaaaataagttgattgataatatgatcatttcgatctagacaattaacaatataagatacaatttgcagtatatattgtcttctcaaataatatgctgtcttaccattattaattaataaaaggctatcatttttagaatagtctgagtctgataaattcgaaagcattaattcacaagtaacaatttcatctaaatttagttcatcggataattttatagctgaaacaatgaattcttgacttaacttgtattctgacccatcactaattttaattttacctttctctagaattgatctactttcttgattttttgatttattggcatttaaatttaaattctgaaggtcactcaaaactttttgaaatactgttgagtcaaaggcattattttgaatagaggcatacaatgtttcaaatggcagggaattccaaatcattgttggatatgatgcagtttgggaaggaaaaaatattatattgtattaaaagaagagatctatgtttgaactgtctacttgtttcttttatcattttttagaaagtgacttttttttttgtcttttcaaatattttactgtttcgaagaatttttcattattaaaaaatacatatttgttacccggacatttttaaaaatttatcttttttggttttactaaaatataatgaaatgtactaccgcattcatttattatgagaaaagcgggctatattacgttgaaaaacttatataactcaaaatacggaacaagctaaaataacaattattgtaaatctcaaatactcttgataattatctttgtatattgcgaaaaatatagtggtctactcttacgttatgaggggtattataacgcatttgtaaaccaaatgactagcctatgtgttttattaataattgttactccattcattataggtatcagtggattttgtattaaaagaaataaaatagtattgtaattttttgtcatttactacagaaatggatttttttaaatttttagttctagtagattagggacacggatatatagatatagaggaatattatatctagagatatagaaaaagtttatattttatatctatccagctgaggttttattattatttcaacaagattaacagttatcaaaaacacataaccatcggggttaccacagttgcaaaaaggaagctccgatgcggggagtcgaaccccggtctccacggtgaaagcgtgatgtgatagccgttacactacatcggaggaattcaatcgccgtttgttgtagatcaaccttggtattatgattatatataaaaaacgattagggttgaaaaatattgttagggttttgtaatggttgtcaagaaaagttctagtttggatttataggacttagggtttgttgataaatcccatgtgattgttgaatactatgtaacaaaatgaaacattcatgaaacattaaatagctaattaaggagaaatgtatctacggtgacagtcgttacagaacctcaaataagaaactatcaacccatagttcatatataaaggaccagtatcttggtatctaaatttatatgtttggttgatttataattatatgtagcacattgtataatacaaaaaaacagaacaagcaataatggtttaattctcttagatatatataacgttcttatatatttgttattgcccttactattcgttcaatagtactgttaaaaaattggtgctaagtccaaactacaacacaatctgttgtggaatagaatagttataaccatcaagattacataagatcctgaatgaatctagaaccaattagtgtattaataagccatacatgtgctacaacattagatgctgcataataaaaagattggattacataagaccttggcaaatctagaatttacctattgttttagtaagtcccacgtgtattactaatcaccatgattagagaattgggatgcagttctaatccagtagtgcacctaaattaatataataaattttagggttgaatcagtcaagtcattaatgtagtaacctgaataatcgatcgagctccagaaaacatataaaaggacaacgttttctggagataaaagatcatcttccataaccgtttcttgtaaataatttatatattatatatgaaaaaaagagaacaacaagcaagtaacaagtcaagtaacttcgaataagtacattagctcgatataagccgcttaatatataagaccgttttagtaattatactattgactatagttgattactgtctcgattatttgaattactattaatattatttgcgcttccctggaatacacaaagaacttcaccacaccatactacaacacaatcgcaggttctgggctcgcgtggcgtaatggcaacgcgtctgacttctaatcagaagattctgggttcgacccccagcgtgagtgctcttttccttctttgtccgtgatagtttaatggtcagaatggacgcttgtcgcgtgtcagatcggggttcaattccccgtcgcggagtttttttgcaccgtatttgtaatagatgaaaacttattacgagagatatactcttctagacgcgaaattagatagatatagcttgaattgttgtctatatatgacatatgaactatactctacataaagagtgaactaatatacatagatatacagataaacatagttatataaacaaaataaacgtgaaaaacaagagcgtcgtcgtcgactaaggaatccacgagatcgtttatagtgacatcaggatttcatatgtcacaatttctaggcaaatggcatctatcctttattcaatagcaagaaaacaactatgaaatattaaatccctaattatatatatatatagttgttgactggttataatttcaatttttacttattttaatataatatttattatcagtatttttcagataccttgcttttttgagtacagtgtatttggttccacgaattgaattgtcataatttttgtttctaattctgtgtttcatcttaacacgtttattctttgtgagaaaattttttttacaaaaaaaaaggtaaaggaggaatagataaaaaaacaatttgaaacaagtagtaaattgtaatataaatagatatattacaaccttagttgcaaataaataagaaggaagatatataccaaatatttacccacaattattagatacagcaatttaaatttatgagcaacatatatacacagtatagctgtttcatactaagtttatcttaaattactgttcacttcaaacatacattcctttctctttgtatatgattttaagcagataagatctaattcacccttcccctaagtacatatttataattctatcttatttataagctccgaaggatcagattgcaacattagtaacaaatcatcctagatagccaatggtgtttattgttattctatttgatttgtcgagtaaaaatattttctccctttctacgtatatcatatacttatcaatccatactatacctattcttgaaagtattaatattttcattttcatagttattattattattttatgcctactttatatagaatgtgttaaaatccaaaaaaaagaagagagagaaaagaacaacaagccatttttggatatgtcttaaaatactttctatggttaccataattatttgaagactgttcaagcaaataaaataaggatattactgtattggatccttgaaaggaaagatttgtttgggatcttatagtaattttactgaaatatcatgatgagagattgtaaaagagaagtcagctatggagtaaactaaaaagactaacatttacctttttcgtcaatttatttcaattgtttatcaatctagttaaaaaatattttttctaacttgtctttagtcttcattaacctcagaaataataaattatccacattctatactttcctctatatataatgaatatatcatttgtattcttaatttaattggataatgtaaaatagcttacataaaaaatacttagcatgaccgttcctcactgttatttttctaatttatagtaatatgtctttatgaacccacacgaaacggttaaaaaatatgggtatttttaaaaaaaatgttttaaaatttgttaggtcatttgtcactcagtcgctagagaaataaaaaaatgccataaattttaggtgaaaacatccatttcgtcttgatttaaataaattagcaatcaaaatattcaaggatggtttaaccgtagtagataagattacatattactagctatataatttgtatcataaagcattctcctttcttaatttttacatttttttctaaatattacaatgctgcggcattgttctcagttaaactctttaagttactataaaacagttgggaaactacatccggtgtcataatctcatttaatatgtctctgttagtctgtttcttctcaatcaacgtggacaacttggtatagtattgtctatattcgttgatgatatagtctttaatggcctctaacaaaaatttacaaatggttttgttatgaattatttccattattcttgtatagactttttttagagagtccgtcatattattctcaaagtttttatttttatcaactaatgaatgttcttgttgatactcttcatttgtttcatagttatctgtagtatcaatgtgtagtgtctcacctataatctctgaaccaatatcatcagtaataatcttaattattttacgaagttcctgaattaattcaaatcgaaaattcttttcctgaacatgagatctcatttgttgggatcgttcagcaacaattgtagtagtaaaatcgccctcattaccattactataaatactgttttctcttctcccaggaaccaaacccttagcaaaactaaataatgctgaattgctccacttgattgatttaataatggtttccattggggagaaacttaattgcgaattagattcatcaaatttattagatatattcaagttttgcatttcatctcttagcaacaaaagattggttaaataaattaattttatatccaatgtatttgcagatccatgatgtaaactatatgcacgtcttaaggaaagaataccattatggaccacataatgacatagttcatcaaataaagttgagtcaactaaaatatcataaattttgaaaagtaaagataacgatcttaataatggagtataataagtaatcaggatcatattcgtagattcaaaccttgtattatttaataacagtctctgcgacaatgtatctacataagaattcaaaatagaggtttcatattcggtcattgattttttcgaagtatcacgatttgaaatcataagatcattaattgtgggtttataatcaagcagatttgtagtgattaaatttttacatcttttggctaattgatttcgtaatttattcataattggttcaaatattgtattataatatacttcattaaactgtttcatatactcttccgaaccttcctcaaattcataatatggttggaataaaacaatcgaatcacaaagttgactaatttcaggttctctaagaattttgtttgttgtagtgttgtataatggttcacaaagtttaaccaaccaggaattgatgacatctttaatctctttctctcttttactattcaatgtaaaaaaagtaataaacaacttatactcattttggcatacatcttgaaaatatgatttcatagatccaagaaatgtgactaaattacaatctttttgttttgtaataatttcatctaattgagaccaaatgacagggaataaaagtttacttcttatatcaaaatatgtcccataacaatcttttaatatagatactaattcatctctatatctaattaaattgctatcataacaacgagtcaacaattcttgaagaggttggtaaataatttcactgatagaagagaatttgttataaatcaatgcatctcttgtattcgggttttgtaataaattgtctttctctgaaatatcattatacgttaatttaaaaatattactaacataatgtgatatcaatgtacatgctctaatcagacattgtttaaatttgattctatagctctccgaatctaataaatctgcatgtgaatggaagaatatcaatgactcatcaatattagctaatagtttcctaaaagaatccctttttactatattagctgaggtagaatgatttaatctacgcataattaaatctagtgaatcaaaataatgcaaatatttaggaatagtttcagaaagtttggtcaattcaatatgagaatcatgaaattcagatatatcactaagaaattttgtggtagataaagatatctgattaaattgataaataatatgatcaaaattatcattaatagactgtatatcatttaacgtatcttgataattatctaatgtatcattcaatttttctagatagtcttcataaatggtgtatttattattagatatacatgcttgtatatctggatcattaatgttagaagtgttactagaattggtatatgtatcactaccaccattagaattatctaatataccgctactagttaattccaaagataagttttgtaacttatgaaccaggtacgtatcatcaaaaatattattaatagaatatatttcattggatattgaaggtttggatgcaatgttttgaaccaacgagtttctacgacttctgaccataactattctcttttattataattcaaaatgaacagaaacaaaacagataaaatacaccagagactatctcaatccattaataagtaatctgttctagactcacgttaaaagataccgacaccaatatttacaatattgcacagaaatgtgatatcaataatactgagaggccctttgatgtcaccaatagtttactttctattaggaaaaggaaaaaacaagtaagttttattttattattaatcctgactatctgtaaaggaaggagaaaaaaagagaaagaaaagagaaaaataagagaaaaataagaaaaaaaaaaaacagaaaatgagatgagatgaaaaaaggaaagaaaattttagtttaaacataaatatgcttatatttatatctcatttagtctcttgtacatcaattgtttttttttcactattgctgttactcattaatattaataattaaactaatctatattaattcatcaaattgtgttctgagagacggaatagataaaaaaatatatatatctgaaaataaaaaattgaagatgacaccgaaacaaattagtacacattcaggttccttccatgctgatgagtctctcgctgtttacatgttaaggttattgccagaatataaagatgctaaattagttaggtctcgtaacccagaggattgggaacagagtgacattgtagtggatgtttctgctaagtatgatggtatcaaatattttgaccatcatcaacgagaatttatggaaactttttccgatgactataatattaaattgtcatccgctggcttgatttataaacattttggcaaacgtattataaaatctattatatccaaaggtaatgatactaatgatgagatttctggggatgttattaatgaagaagatttagaggttatatatcaaaaagtctataaacagtttattgaatcacttgatgcgaatgacaatggtataaataaatatgatctacaagaaggtgagacagttaaatttaatgataatgcaattactatcccaggaatcatttctaccatgaatccattatggaattcaactgatacaagtccatctgcatttgatcaagcatttgaaaaggctagtaaatttattggtgaaatttttgttaatttagtgaataattactttaattcatggttgccagccaagaatattgtagttgaagcaattaaaaaaagaatggaagtcgacccaagtggtaaaattattgtgttatctcaattctgtccatggaaagaacatttatataatgtggaatcagatgaagatattgagaacacaatagaattcgtcatatttattgattctagcggatcatggagagtctctacagtacctgtcacttcaacatcattcaaatttagaaaagggctaccagaagaattgaggggcttgagggatgaggaattaagtgaaaagagtggtgttcctgattgtattttcattcatgctgcaggattcatcggtggtgctaagagcaaagaatccgcattgaaattagctaagatgtctttatgaaggatgtgtatagataataataagtaacatataacaagtaacaaagaagaaggatcgttatttagtaatctattcataactacattaacaattattttgttggtttattaatttaatttattcactatgtagtgtaattatttactaaatgtcacagtcaatatacatatatatttggtctgtaggtttttttctttcatatttcatctgataaaaacaagagaacttttttcaaacccgatgacatcttgttaagtgaaatcaaacgtttttcaaagcccttaaagaaaaaacaaaagaaagctctttaaaaacacactgttagcatgcaaaatcttctttttttttaaagaggatatataccattcttttgttattgtatatattattgaattattgaaatttaaataagaaagactactacaagtaaaaacaatggattggttgtaataagaaaaaggtatgagtttaaagactttcatgtgtatttttatttatggtcaaagataaatagaaggttttctttgtagtagattttagcaagaaatacagtctttctgccaataacaaagattcgcaatttcttattcttttcaatataatatatgacaaattatgttatgtgaaatagatatttaagaatggttaataaaatgttcataaaaattgtttttttttcatattgaatttattgattttttagattactgttatttttaaaataaaacatccatttttttaaggcatacttgttgaaaaagagtagaaaatgttttataataattataatttttattccaattttatattagttatatagtcctatattatacagtttacaaggctaaaatactttgttatttataaggtatattaagtgttttcttttataaaaagttttctttttttttggagaattcttttttatgctctaattgtatagttatgttggatatcacatgtaaaaaacaatatgtgaaaccggtaaaggatgttacgcttaatacataaaagtgtcactttgaagtggatagtatttaaaaaactgagtagtacatactaaagatttgtttggatttttttttgttaatggagtagtttatgttgcagacataaaaaattaagaaaataagctgtttattaaaataataaacaaaaattaaaaaatcgtatgttaacatgatattataaaaatcaaaaatactcaattatatatatatgtacaattatttaaaaaaaatgcttctaaacaaaccattgaataatttaacttcaaaataacttcaatccaaacaaaaaaaatactaaatataatactaccacttgcaattaagataacccttcttcgttcttaaagaaaaccaatgatctctatattcgcaaaattcttcttctataaattccctaattttctgatatacatattgagatcagttttactatgtaaaaccatccctgtgataatatttattaatacaactaaaaatccaaagagtaaataaaaataaaaaaatttaaatggttcttcttatttgattatagaaaatatgataattctggacaattcttcctctttaagtttagagtaaagacaatttgaattttctattagttttattttgtcaaatttttcatagtaaaaatctatacaatgaatgcattaccttcggtaatctaaaaatcaaaaaaggttgatcatttaagaataattatgaaaaatatagaaaaataaccagatgaatatctaaaacttttgaaatgaaacctactaaattatatatgaaaaaaagtaatactcaagaacaaactaaaaaaaaaatttcaatacaaacttcataaaaaattacaaaaaattttcaagaaaaatccaaaaaggttattattaattttgaaaaatgtatgtaaatcatcaaacaatctctatataaatattgatatgaccctcatactgattagtgatttgaaataaaaccaacttatggcttccaatcatctatgtattgatagtgaccaaaacaaagtacagagagaatatgaataatcttttaaaagaaatatacacagacaagtatgaaatcaaagataaattatgaaggagaaaaataatttttcaagaagaaatcttcagaaatgtgaaacaaaaatttcaagtttttatcagaattaaaataatctactgaacattttaagatgtagtacctaatatttgaaaatggagtgagtcgaatttaataatactaggttaagtttaaagtatttctaatagtactatctactacaaataaaaaactctaaacaataccaattttcttataaaaagtctaaaaatacaagattttatttgtaaagaataagcaatttatcaattgaagctggatggttgtttcctcagctaaagcaaacgactagagccagtacaacatatgttatatattcaaaactagaaaaaaaaaagaagaatataaaggtatccatactttcaaacaaacaattatcatttaaataaaagtgaacaaaccacagaataatgagaaataacattgaaaaatcaattgaaaagcaagtttttcttttttgatgatacataaaatatatacatacaaaaaaaaagataaagcaaacttttaacttaaaaaatttttcactgttaaaaaaacatcaaactcttaacccaccgttcattagggtttttgctatttttttctttattggaagtttcttttttcttaaacctatttcgaggtttttcaatccacaagatccatgtggaagaaactcgacctttctccccttatctcccccctcaagggtaaatatgtataactttgttgtaatatattattgtatatacatatataccatacagttgtatgtatgtatagtgcacatcatatatatatatataataaagttatacatatgatgtcttagggttacgattttggaaccttgaagcagctttttttttttccacaaatctcccttttgggacacagacttgcgtcctcgaggggataacccagaaacaatagaacacaaaacagtcgacagtacaaaggcagtcgaaaaaaacaataaacagaaagaaagaagcccttaagctttttttttcttttctttttgggaattttttttttcgtctcctcaaagaaaaaagagcagttttcaaatttagatcctaggaaatcaataaactagccaaaaaaaaaattaacagacacgaaacaggaagagaaaactgatatttgccaaataggtgatctagagtatacaacaaacgaatcctcctttttctttgctttcattccttccagtccatttatttattgttcaatattctatattggaacgtccttttctttaatcctttactaacctgtcactttaggtgagtttagaaggtgatacgcacagatcaaatagtgattctcagaaaacttagatcaaaaattacctgtaatatctaataaaatctatagactaaaatctatagaaatatctctatttcactacttcctttaccttttacttccctatactactactgttattatttgatctaatcagatacaataataaacaatattccatatttatctattcatctattcatccatccatctattaatctatttatctatctatcaatctatacacatatatacaatcatgaaagggtttctttggtcaaggaaatcttcaacttcatctaattctaaaaatgaaaacatttcaaacaataaaaacgtcaacactatcaaaaacaaagaacatagaaaatattctagtcagttgagccaacaacaacacatattggaactctccaaaaataaaacaagatcatcctcatcaacctctttatctactttaactcaaaacagtttgtcaaatattttgccaaataaatctaatagtaatcatcatcattctgaatcagtagaaaatcttccatcctacaactctaaacaatctcattctcaacctcattctcaatctcattcccatttgcatcaacaaagccgtaaaagttctatcatttcaaaggaatcctatttaagaaacagttcaagccaaccggtagtgtctctcaatactaaaaacaactcattattcagttttaaaaaccattctactattagtgttgtgtctcgaggaagtactcaccatttattacctaaaaacgatgatactaactcagttttactctatgaaacagtcaacaaccataataacagcaacatcataaaccctggaattgatcaggacattaacaacgcaaaatcaacaaataatattgatacagatccagatcttttaaactctacctctttgaaaaacaatgacaagcctgcaaatattacaatacgtttgaacaataaaacttatgattccaccatctttaagtctgattggattaataaatctcacggccagattactattaataaccccaactaccataatcaaagtggagcgtctgcaatgtccccttcctcttcagggtccttaaatacggataagcattcttccaagagagaaagtagattctttagtaattatagccacaataataacagtagttctaaagaattactaatatccggtcctcataatattactgatgaaaatgactcatctatacaacgtcctgaatcatataataacaataataaaaatcatttccattcacaatcacaatctcaacaaattattatacctgattatagactttatagagctcaactaaaaggttctgtgttttctttatacaagaatggtgtcaataataacatcaaatgttttgatccaaatctaccacctgaaaataataatgttacaaacaacgatactattgataggtccacaatactgtctaccgaatctttaccaagtatgaacactaaaaataaaaataatagcaaaagagccactattgcagggtctttatcatcagtacaaaactccagcacaaccacaatagatgataagataactaacagttccagtgatgctacaactaattgtaaaataaaatatttaaatgataaatttccccatcctgatttaataatagaccctcataccgataaaattattgatggttctttggagagtttatgccacacaattcttttccattctcacactgacaatatctcagaaacctcccatttaaccaatttacaaccatcaggtattgatatatccaatcttttattaatattaccgttaatcaatgattttattaaatttttgactgtttttaaccaatttggactgactttcacgaagaataattctaaaatcgctttaaattcaactcagtattttcatatttctaaacaaaaagatgctttattaacagatcgattagcattagtggtaaaaactgtgttaaatacattcccaggatttttattaagtgacgaaatatttcaggcaacgattacactattagatacaatctcattacataatgatgagatttcaaatagtttaaaaatagctgttgcaaacaaatataatgaactaaataagttaacatatttcataagaccaaattcttcagataaatctgggaacctactaaaaattaatccgaagttattagatgaactattagatatcaataaatttttatccctggatactaaaacatttgccaataatatccatttaattaatttaaaatttgataaagtgtgggctcctagactagattacttgctattatactcttctaaatatattgacatggatatcactatacttaatcccttagtattcaacaactcagagaatgttcatttcttagggagactattgatatgccatctattcccatctcataagactaccctagaggcacagtcgaataccagtgcccaccgcaattttatatctgacgctagaactagagctaaagtacttataaaatgggttcaattaggttgtagactagaacagttgggtgatatggtttcgtggttaacaattgccacaattgtttgttctattccaatactaaggctatctcaatcctggcaatatgtaccagaatctattttaaaaattatatttaaagattgggttcccacaattgtccaactagacagaagacaaatgtcatctaaatccactagtagtgtttttattttagctcctccaaatttagaagaaccttatattcgagaaaacgtaatatcatattttggtgacttgatagttattgcggatgatttaccaaacaattctgctttgaaatatcttgaaaagaaggtaaataggacaaaaaatgccttccacaaatggcaacaaagattagaaactattgataaggaaattgcaaaaaagggtatttctattaataaaaattctgaggtgaaagaaaacgatccttcaacagatccattataccagttctggaagtaccatacatcacagcccaaattgaatattactaagataatgcaaatcagtttagagtatgaaccaccattagtaaatcaagaattctactccattattggctctcagagaagttccctattaacaggaagctaccttcccatagtctttaatgaacttctgcctaattatacactatttccaagaaaatctttagtcgaggcagcaggaaatttactaccgaataacaacaacctcaaactaccaccgccaagatcatctgcaaggatatccaaagcccttgtgcttagtgaagcaaaaataccagaacaaatcataaaactcgattttgagtccaatccaattactggtgttgagaatattgagggtccactaataaaagaattaatgtctacaccttcaacaaaacaccttttgatgaaatccattagagatatgttcaatatcaatatggacatgtttcatatttccaatgatctggtttttaagaccagtgtagacacaatagaagatttacatagaccctccagcgtttttattgaatcacctaaaagattttcccaacattctctcaaattaaattctcgtgattcagtagacaccacaggtcgtttgagtaaaacattggaaaatttagatttcttcaaagattcttccaattcgtctgacattttagacacctcagctattgatgttgttgtcaaatctgcatctttagaaaaattatacgatctgttagtactaacagctggaagtttttcaaaattaatcgatactaaagatttagagaattattgttatcaccgtcagaattcatctacttcaaagaacactgttggtctattagattttgcattagcaaaactttctatggataacgacacttttagagaaacattttttaacacatacaaaagctttacaactactttaaatgttttggagaatcttgccaaacggtttgtaggtgctaaaagttgtgcaatgaatatttgcaatgtaattgattctgacacagtgcctgctgattctgatatccaatttcctgtttgggatgctgatgtccctgaagatagcaataccaatgaaaaatacataattaaaattcaaattggtacagcagaagctctccttcatctgatctctaatcattacacagatttcactgataacattgaatgtcatactactgtccttgatatattaaaaattatggaacaggagattattatagaatggccaaaacgactcaaagttgctaataaaaacactaataccaacacaaaagacgctcataatttaactttacttttggaagaacttactagtttatttaataatattaaatctcattatcaaaaacaactttatagaccagttggaattagtaagatgaaaaagaaaattatagaacaattgtctagttttagaaatttgacatttagtgaattttctaatatgcttaatgaaaaatacccaatggatagcttgactactgacttcaagtctatgaattacagagactattctagtatttataattgggtttgtaaactggacaaaatatttactgatgcatttaccttgactactaaacaagattggatagcaacatatgaatatttagagctactttccaaggagtcattaatatccttttttcaatacccacttcatagcatttctaaacgcttaattaataccggctcatcacagttaaaggaaatgcaaatatctaacatattcttatggttatctacaatatcaaatgtcaataaccagtctatcttttcaggcttagcctcatcacttcaactactatttatcatccatcagtcgttaacatcattttttcttgctgaaataactgatgttcataaacaacatgaggatcgtattaatacttgcgctttgattctacaaatcctaaattatgttagatggaagaacaacgccttagatttgtttaatctagaaaataacaatgatatatctccacatattccatcctttattgaatctgcaatttgcaacagtattgtaagcgtagagtcaagattttttgagtacgcttggtcattagcaggatcaaaacttatgccagaaaataatagaaaccaagggagatcaattaaaaatataattgaaaatattgatccagttcatattagaaattttctagagatcgacaatatttacacagataaaaattcaaaaaatttgtgcccctgtcctggatggtttatttgtagattacttgatatatctcagtatgttcctaatatggatacaagcaattctaaattgattaatttcgataagagacgttttgtaaataacatcgtatccaatgttttcagtttgatccccaatagctctaaaatagagttgtataataatcttgacacctttagaactggatgggcgaaaattttatttaacaaaattgaaccaccatctagtaatctgaaaaaaaaagcatacaatatatcattagacaagtctaaagcaataaaatttcaagaatctggacttttcaatggtattattggtgatgaagttgataaaataagaagagaagaaagaaaattagagctattaaaggaacaggaaaaatattccaaggtgagtgaaaatattacaataaactctaaatatgcagaaaaagatgctgttacctccaatcatttatccttaaattcatccatgactaccttaaacccctcctacatgtccaattcatcaggaaacaagaataagcggaattcagttgccccaacatcaagaaaccattcaactgttacccattccagtggtagtgtcagcaagaaaattggaggatttttcagaagacctttttccatcgcaggtttcaatacatctacttctaattattcattgaataattccttagtacctgatgggacagcaagaaaagttattcaacctgatttattgcctgatatagaggacaatgaattagaaggtttgaaaccagtcctaacattgaaaacatttgaaatcaaaaatattatggaagttattaatcacaaaaataatatggcttatattcattccttcaaaattgtcatgcaagatggtgatgaatacatgattcaggctaaagacgctcgtgaattgaaagaatggattagaatgttaaatttatcgaaaagatattcattttattctgaaaaattcaaaggcaaaacacacaacaaggtatttggtgttccattagaatgcatatgtgaacgtgaaggcacattagtacctactatagtaatgaaattgttagaagaaattgaattacgtgggctggatgaagtagggttatatagaattccaggttcagttggtagtattaatgccttaaagaatgcattcgatgaagagggtgctgttaataccagttttacattagaagatgatagatggtttgaaatcaatgcaatagcaggatgttttaaaatgtatttaagagaattaccggattctctattttctaataaaatagaagaatttgcaaatttagtattaaattataaatcaaataatccatcgtatgagacttataaaacagatgttagtaatttattattgaaattacctgcatgttattatcacacgatgaagagaatagttttacatttaaataaggttcatcagcatgtagaaaataatcgtatggacgcttcaaacttagccattgtgttttcaatgagttttatcgaccaagacgatttagcacgttgtatgggcgcaactcttggcgctatccagacaatattacaacaatttatcaaaagtcctcaagattttttcatataatacctttatattactaaacatccaaattataaccactattattaatgtcttttatttcaccttcattggcgtgtatgtcttttttgccttcttctatttagtcatatatatgtttcatatattcaattaaattttaaagaaataatgcatagattaatttaatttggatttcggctttgtttaagtatttaaagttgaacaaggacactattggtatcttgaatatatttacaagattaacttaaacgagcaacatatatacgtatatacatcaaattacataaaagaattaaaaagaaaccatgacaccaactataacctacacatacacatattatttctatacaaaccaactttaattcttcaaatctgatctacgtataattttaattctttcattgcttcttttctttttgattaattcatgcactctttcttcttcttccttcactaatcttctcttttcggcacgttttctaacagtattcatattttctcttatagctgcaaagataccattattaatctttgttgggtctggagaatgttgaactacatctgctatattcattttctttctaaaccatttgttcctaagtagtaaagtctgtaacaccgagaaagtaccattaacagcaaagtacagtaccacagcacttgatagtttcattgtagctggtatagataccaaaggtaatattataaaaaatcttttcattggaccactgaattgttgtgcacctgtctctccacctaacctagaaaatgacattaacacagaggcagtaatgatttggagtccaaaatatggatcagtcatacttaaatcattaaaccacgcaataccttgattagtaaacccatcgacaggaaaattggccatgcttcttaaagcattgaaaaacccgatagcaataggcaattgcaacattggggcagccaaccatctatttttaatcccattatcggataataacttccttctctttagagcaatcttttgtccctctgctaaatcggttgtattcattaattgtttagtaattttatctaattgtggtttaatcttggagtttttagcaatcatgtctgaggattttaaatagattggaaacatcaacaacctaactaaaacagtgacagtacaaatagtaccccaccatggtagaccggtgtaaacatgaacatattctaacgcatgttgaatgatatcagcgggccagtgccaagtctgtgccaaacctatactatttaagtaaccgatatggtttgataattcacctatagaatgactagcttgatctacaatctttgctgtcgtatcagtcatttgatcaacagaaggtaactgagtttgaacttctgatatggattctgaaagatcagctatggtctctgaagtagatttaaaacgacgacccaacgtaatattaattggagaataatgaatacctggagacattcttggggtaaattttaaagactatattcaaatgaaccttaaaggaaaacaaacaaattaagtcataaagacgctaattatatagaaacagttagtatagaatgtcgacgagatgcaatattggatatattcataaaaatgtataattatatttatttatcgaagtatattcaaaaaaaaaattaactgaaattgtttgaaaataatataataaaacataccaatcttgaggtagccctcaacatagttaacctcaacatgattttgtatttccccctttccactttatagttattgttagtgttaataatcttattagctacttttttttcctttttaaaaagacactctttttaacttactaggtgaaaggtatagataatatagactcaacagtaactaccaaacactatactattaatcgtataaaagtgccttaactatcaatgacaagagaaacttaaatatgtatttttttttgtctctaaagagatctaaaccttcctcgaactaaaatttcattcatacaatttttagttgatcgagaattacaaaaaacagaaaaaaacaaatagaagagttcgaaaaatcaaaaaggtggaaataaaatccacaactttaagaaacaacattggggaagacccaaaggaaaggtaaaaggatcgagacaaggagagaggtatcgaaggatatattaggggaataataatgttggaaaaaggcagacaaggaactaaaagtaggtaaatttatatatatataaaagggatggggattatgaaatcattaagattagggatgatcgttcagtgtcggaatgtaatgacaagtgaattaagaagatccctctatgcacaatgtttaaacagagactttgacctgttgttaccacgtctacggcagatcccaacagaagatatggattataatctgatacaattggtattacgtcaaagttgtaaatgggatcatatggaatgtatcaattttatatggtacaaatacgttagaagaaataattccatgttgattgaacctaatgtgttatgtgaaataggtcaaatcgcactcagtgaggggaaaagttttatagtaagagatctatatacatattatacacattattacggtaaacgttggcgtacggttaacccaagagaatttacatattgggagtatgaattacttcgaatcaagacagagatgtttgcaaagaccattataaataaggatttcagtgaaaaatggaaagtatttttaaaggatatggataattatttaccagcttactgtaaatttagttttagagatttccctgaattaatcaacagttatcgtgaacattattatcaaaataacaaagatcaaaatgttgacaaaaatagcaaagataatagtaatgaaattttaatgtcaaaatatttattccaagacaaagatatcaatgttaagaatgagactactttaccacttttattaaatataatattgcttcaaaataatatacatttggataaaaggattaatttatttaaaactttttataatatacatccaaaattgtctgcagaagaaagtatattaattttagtccacgaatgtgatgcgtatagggtgtatgaattacttgatcatcttttgactaacaaccaagatattttatataatttaccattatatctgtcccaaagaattcaagacaaattgaagggaaccacattaaaacacaaactgtccaaatatatatcaattaaaaaataatatacaatatctatatatacataatcaaataaatatattcatgtcaatatctataaatacataccacacacacacatatatatatatatatatacatgttatcttttaattacaataaaataaaaaataaagcaaataattgcaacaaaatgacaactatgatgaccagtagtcataaaataacaacaatcccttcctgtagtaagggtccatggtaaagatatctcatttatattgtaattcaccaactcacttcatatgtaaacttaaaaaactaatgggagactgcaacaaaaagaaattaataaacaaacaaaatattatgaaaaaaaatacttaaaagccaaaccatataatatgaatatttagacacataacaaggaaattaacaaatggcaaaaacgtcatattttattaaagaagaaggagaaaaaaattaaagaagaatacgctgatagtaataataacaaacgtaatttagttgttactattagtctcatcatcttcaccttcttcattgataccaaaattttctcttaagaaatcaaatttttcgttttccattatagttcttttaacaatatccgcagtaatacgtttagtattcatttgacgtgccatttggccgctttgttccactaacattgccataaaaaattccaatgatctgcctgctatcacaggagtggcttgtgaaactttaccaatatcatcatcagtttgcatgattttcttaattttagcaggaggaaaatgtgtttttatcctattaaatacatcattcatttgtaaagcttcattgtcagtattttgaatatcttgattaacatttaacccagtattctcagcaaacacagctggtggtggcatgtctgctgtcaaaagatcttgcaatactatatttcctcttcctacttccattttcaataacaataataatagtactgatagtgcgtcttaaatttgtcttattataaataataatgtatctaaccttttattatctttcttttttttaatgtattctagtcttttactttataataaaaaacactattccaagaattaacttcgtcaattgaactaacttatcttgacatacaaactagaatctttcaaatgttgacagaaaccgaattctacaggcaacagctgcttgtacatacatgcgtacagacactcagaggtgcatacatatatatatatacatttatatatttatatttttatgcaaataaataaagggcattcatcgcacaaactcaaaaaaaaaaaaaaaaaaaaaaaacagaagaaaaaaagaaaagaaaaacagaagtgtccattctctattttctttcactttctcctcccaaatttacaacgttggtgtttgaatatttttttcctccatgaacaccaaaaagaagagaaaaaaaaaaaagagtgaaaaaaagaaagtaaaacgaaaaatacagcacaataaaaatttagggttctattcctttccccccaaaatttgaaaattatggactagggttggtcaaaaaatagaacaattaatcatggagaaaatgcctgtaataatgaataattaaaatggattgactccgtgctcgtgatgactatatagcgttctatatatataattacttgattcatttatatttcttctttaaccgcattttctcttcttcgtgtctccttaaccattcttcttcctttttatcttctagcttggccattctagttgcgtattcctcttcttctagaatttccatttcattagcctccatatcatcctcattttcatcatcataatcactataatagtgtggtctgtttctacctctgttgaatatggcccatatttcgtctctattataccctggatttcttgaacgtgcagaatatctactttctttctcatctgaagcatcttcaataaaatcatccaattcagagtccatatcttcatcttcatcataattatcattacgtccattataatgccttccaaacctatcatgccgactttgaaccttatatccctttctttctagcctttgtttaatcttagcatttggttgtgcaaatctattagttgatatagatggtatcttgacaatattcttgctatcaccaccactatcactgctatcattattaatgttatctttcttaatattcgacgctgatttgctcctattcaaagatgtagatacctcttttgaacctgacgcctgattatcctctctatgtcgatctcctctaagagattcatttgaattaggagaattaaccctagttgattttcttttaaatccaggtttaatcaattttttcgatcgccctattgttggtggttctgatgtagatttcataggcagtttgccattctgatcagcttgtctcatcaactcttcaaaagacatcttctttatagacattcttggtttgatcgccttattactatcattataatttgcacgagtggaagaaccaatcttttttttgtatactgtccctaacatccctccatcttcgtctttttgcaacttattttttttatttctgtgcgaatcaccactaccagattgtctttttgcagttgcatttcttttctttaaaagctccccgtttttaatccgttccttacgtcttaactcttttaatcttttcactgccggatcctcatctctcacataatttacaggtaacaatgattcaacctcttgtaccgggttgctttctttatctgggattacgggtgtatgcttaactggtgtatttttcttcaatgcagataatttcgataaaaagctcattttaactagcctacgttctcatattaacggtttgttcatcttcatctcactcctaaaattagaagatcaaagagagaaaattccaccatatatgtctcttacaaacatctacgtaatcctaatacactaatgtatacaacaagtatatcaatacgataatttcttataaatttcgataaaaatcaaacccacaaaagagagaaaaaaaaaaatagaaaagaaagcatgaaaaaaaattacttcatcatttcatacgaaaacttatgcttctagttcatccataaaggcctcatactcgtcgtaatttatatcctcatctacaacttcatcatttttatcgtcatcatcttcctcttcctctttctcttccccacttcctacaacttggttattttccattgttgccaaatttgaactgaaattctcagaattaatttgatccactttagcaggaagaaatcctcctggttcgacatatgcatcactatcgttctcattcaaatcttggtttgccgtgtaatcttgttcatcatcttttgctacaccatatgtctcaataaggtttgatttaatctttaatcttaataacatatcattccaatcttgtaaatgtttcaactgctctgccctttgtacatcttgttccaaagaatattctataccttcaattgtggcaattactgcatctttaaaccactttgccaccactaccccagtgataacaggattaacattaccttttcccattcgcctcttcccttggaaattaaaagtcgtcactgcgggtgcatattcaattctaagaaatttacatgctctaatggaattaggattttcaattagacaacaattacgtggaatcatacttggtgtaaatacctcaatatttccataagtatttttcttaatttcacctaattcgtttgcattgggaggttcatacaattcagtatcgtctatactatataatctctcgataccatcatcattaatattatctgaatctttaagtcttactccaatattatcttttttcttaacagttttcttaaatctagcaccagattttaatactctccctaattgataccactgcctcggtgtttttaaatcaatcacatctttacgtaaaaacacttttaatactttactaggttgtttcttattatttaaccttaaatatccgcattcctttgcattattgactaaatattgtgtagttttgatatccttctccaaaatatacttgggatgatttttaaaatcttgtaaacttgtaggcatcccctccatttcatctctatcttcaaaatatagatcttcataatcatcaattttgattcttttccttaatgtcaatctttttaacactttactataccattccgatcccttttggtcatttgttgcccttccatgtctgaatttataagaatgcatttgtttaacatatcttctacttacatccctacatccttgttttctatcatatgcaataacatatctcatcaagtttctagtactgctagaatcaggttccaacttcgaaacattacgtacttgttcaattatttggaaattcattggatcaatagttatccattttttactaaatttatcccaaacttcacaccaaaaaattggaaatttaaacatatcggaattatcatgctgagaatttattgcacttttcaatttcatatcagataaatcaggcggctgacacgaaaaacataaccttgcattaacttgataagctctcaatagtgcaacaaacccttgagatagaatatctctattaccgcagcctttagttacagctttaataaactgagattttgtcataggatggttatgataatgcgtcttaatttcatcccaatgtctcatatataagcctactccattgtatggtttaataacgcgacaatgttttatccagagttgcatactttgtttcaatccatcaagtaacttccttgtactacgtaatggtaattctagatctaatgttggatgtaacaaatcttgtaccttttcggaaataatacgttttttatacaacttatttaataacttatcatcatttaaccattcgtttcttaaatgcccatgaattaataaacataataagtattcaaaatgaaattcctttctaaattgtcgcacatcatttgacactatatttctgtgcaataaccgcgcacgtttttccttctgtttcttaaattcaacttccttagtgttgtccaagttattaatcgtaatatttaaatccccactcatatcatcatctttgtttatttgctcatcgaataaaacatcttcaaattcttctgaatcaaactcttcatccccatctccatcttcctgttcctcctgctcttccactggtttctctttaatgatttccatttctgttccagaagattctgaatctaacacgactgtgtcacatgatggacttttatctatccacaatattgattcatttttattgcttctcttccgtttctttcttggccttatattattatctgaagatataccttgttctttcttctcttttaggacttttcgtattaaatcaaattgttcacgagtcagatcttgagacattatttattcatatttttatcctaccaagtattatgattatttttaaccgtatactattcttattccattttatttcattcagtattgtttcttaggttcccttattcatacatattttaatgttattttgttaagtctaatgacttctctattagatggatatgtatttgcgttaacactctaatgctatttccgaaaactttgaaaatcaaagttttaagggaagcgaaaaataaaacagggctttatagatttttcttcaggaccctactcttagctggtacataatttactattttcctttagtaccctaacttttaaaaaataactatctaagtgtattgataaaaaaatatatatatatatcgaaaaaaagagtgtgaccagagggaaaagatgtacaatctaactaagcgcagcaagaacatatatatatatatatatttgtatatgacaagttgtataatgattatacatttttattgtaatatacctatcattttatccatctattcatttaataatttttctactttatccattaaaacatctaaatacatgtctttacggtaactgttatctccaacaaattctccgtctttatacatagccgccaatgaatcatataacattttcaaataaagataattagatccacttggccctactgctttagctattactacagccgtatcttcaatatcttcagggccaacaaaagcttcattcgaactagaatctgttatcccgacataaactgatgattgcaaaatttgacaaccagtaacaggatctttttctaaatgtgacagagattcagccaattcttcacgttgtgattcatttggatatagatgcacggaaacagtatgcaaagtatatccattctgttctcgaatatctaaatattgtctcacttcatctgaatactctggtggaatataatataccacacctagtgtggttaaatcatcgtgttttagttctctattatgattttgatagtatttttctacatcagtgcggtatttgggatcattcataacatcatcatagggtattaaggtaactacacgacctggtgcttctggaatacccctgtgatcaattgacgattgccaaaatctacgaatatacccatatatcaatgcaggaatcctttgcgtataatgtggaggtggtttgtatatcaaagagccataccccaaaacccataatccatctttattttgagtcatcacacaataacctttattattagttgatatctttgttttccttttactgtacttctttctaataatgcagctagttgctttgagtggatatacagatattaaattttctaataccttttactttcatccctccctacacatattttatattattaatactgcttatacagataataaagatcaaaacattcgctgtgatgactttaaaggagcttactgaaatgaaagtgaactaaccaatacaaaaaaaaaagagttcttacggaatttttttccgtctatggttaactccgcattccgtcaagaaacgaaaaagaaataaaatgaaaaaaaaaatattattcgaatatgtctcgcgtttctctttgggttggtctcaaaaatacaaacaattcattaagaacaaagaaaaaattaaatttttacttgtgtgcttatgatttttgagatatccaatttcatatcttgtacctttaaaaactatcaatcattttatatctgataaaattcagttaatgtctattacataaagacattattattaaacacaaatacaagtacaccaatttgtatttacttgactattaacacgtaatatatatttatgtatatataatgggcacaactgctatagattccgatttcgagaacgatattctaaaaaatccggaattgtatgggttaaggaggtcacatagacgaaccgcagtacaccattatactttcaatgatgatgatgatgatgatgatgatgatgttaccataggcagaagaagaagaaagaaaaccacggatgttgaggacagtaatgacgataatgattatgacaatgaatctgatctgtatgaagatgaagatttaatgaatgaagatgaagaagatgtaaatgaagatgattttatagtggatgacgatgatatagactattatgaaacaaacacaagaaagaagaacagaaaaaatgtgtcagccaaaaaggctagaaacaataaaaaagtctcgaatgaacataaaatcagtaatgaagataaagaactaaagaggcttccaaccagattttcagcgcgtaataataataaaactgtcaactataatgtggatatttctgatgatgatgatctattagagtctgaatatgatagctttgacgaaaccggtgcagatgatgaaaatttggatagtgataattatgatagagatcaatctatgacaccagcatcacaaacacaagaacttcatagtattgacatggtgattgatcatagaatgaaacagggacaatatcaccccgataatataattccagatctgaatcaatgcaagaaatggtatgaatttttgattaaatgggctgatcaatcccatctacataatacatgggaatcgtatgaatctttgggccctaaaatgcgtggtttgaaaagattagataattattgtaaacagtatatcattcaggataaagagattagaatggatccctatttgactcgtgaagatctagaattaatggatatggaccgtgaaagacgtcttgatgaatttgaagagtattcaatacctgagagaattattagtagtcaaagagtttctacagataatggcaataatgaattacaatatttagtgaaatggcggcgtttgaattatgatgaagctacatgggaaaatgcaaatgatattgttaaattaagccctgaagaagttaaaaatttccaacaaagatctaattctaagatattaccacaatattctagtaattataataattctaatagaccaaaatttgaaaaattggattcacagccatcatatataaaaggtggtgaattaagagacttccaactaacaggtattaattggatggcatttttgtggtcaaagaacgataatggtattcttgctgatgaaatgggtttgggtaaaactgtacagacagtctcttttatcagttggctgatatatagtagaaggcaaaatggtcctcatttaattgtagtacccctatctactatgcctgcatggcaagaaacttttgctaagtgggctccagacttaaattgtatttgttatatgggtaatcaaaaatcaagggaaattataagagattatgaattctatactaacccacaagtaaagggaaagaaatttattaaatttaatgtattaatgaccacatacgaatatattttaaaggatagagaacaactgggttccattaaatggcaatacttagctgttgatgaagcacatagattaaaaaattctgaatcatcattgtatgaatcgttaaatagttttaaggtgaataatagactacttatcacaggtacccctttgcaaaataacattaaagaattagcagctttaattaatttcttgatgcctggtagatttactattgatcaagaaattgattttgaaaatcaagataagaaacaagaagaatatattagagatttacatacaagacttcaaccattcattttacgtagattaaaaaaagatgttgaaaaatccttaccatctaaaacagaacgtattctacgtgttgaattatctgatatccaaactgaatactataagaatattcttacaaaaaattacagtgcattgactgctggcgctaaaggtggtcacttctcattactgaatatcatgaatgaattgaaaaaagcttctaatcatccatatctttttgacaatgctgaagaacgtgttctagaaaaatttggtggcggtactatgtctcgtgaaaatattcttagaggattaattatgtcatcaggtaaaatggttctattagatcagcttttaacgagattaaaaaaagatggacatcgtgtattaatcttttctcaaatggttagaatgttggatatattaggtgactatctttcgattaaaggcattaatttccaaagattagatggtacagtaccatcagctcaaagaagaattgcaatcgatcattttaatgcacccggttccaatgatgatgtgtttttattatccacaagagctggtgggctaggcattaatttaatgactgcagatacagttattatttttgattctgattggaatccacaagcagatttacaagctatggctagagcacatcgtattgggcaaaagaatcatgtgatggtgtatagattagtttctaaagatactgttgaggaagaagtattagaaagggctcgtaaaaagatgatcctggaatatgcaattatatcgttgggtgttacagatggtaagaaatatactaaaaaaaatgaaccatcagcaggggaattatcagaaattttaaaatttggtgctggaaacatgtttgctgccaaagacaatcaaaagaaattagaagatttgaatttagatgatgttttgaatcatgcagaagatcatgtaaccacgcctgatttaggtgaatctcatctgggtggtgaggagtttttaaagcaatttgaggttacagattataaagcggatgttgattgggatgatattatccctgaagaagatttgaagaaatttcaggatgaagaaattagacgtaaggatgaggaatatgtgaaagaacaattaaatatgatgaatagaagaaacaatgcattaagaaggataaaaaatagtgttaatggagagagtaatacagctgatgattccgatatatcaggttcagatgatgagagaagatcaagatcaagaagaagagccagagctaatgatttaaacgctattggtgacaatgagattcgtgctttgtataaagctgatttgaaatatggtgacttatcagatctttttgaaagtcttattgctgatggcactcttcctgttagatcaattgacaaataccaagaaatttactctgaaatgctaagtgtagcccaggatgttgtttccactgaagaaaaaaaacgtaatactattttggagaatttggaaaaagaggctgctgaatatcgcaataagattaaatcaggtgaaattgatatttctaaacaagagaaagacaatcccctgtctagattatcgtccaaaagaagggaaaagaaagttgcgttcttcgaatatatgggtgttaagtcccttaatgccgagacatttgttaatagagcacaagatttaaagacattaaaagactatattagtaagcattttaaagaagatccactgaaatttacattagaaaataagaaacatcctaaacctgtacaaaattggagttgtagttggaataaagaggatgatgaaaaattacttgttggtgtttataagtatggatatggttcatggagtcaaataagagatgatccattcttgggattatccgataagatattcttaaatgattctcaaattgtcgtgaaaaataaaactaaagaaactgagaagccgttagattccaaagaatcctctgcagttctcgttaaaaggggtaaaggtataacggggtcatccaagaaggttcctggaggtattcatttaggtagaagaatagattatttaataactctcttgaaagattctatgagtacaaacaacatcattccatctaatgatgaatctactaatacatatcacaacacttctcctgtagctaatagtagtaacactacttctacatccaatagtagcaacactacaggtaacacaccaacagctattactacacctactactaatactgctacgggtgcctccagtactgatatcagtccaaacactatttcaagtatcacaacttcagcttctaatataaatacgaataaagccaatagtgatttaccaaccggacccaagaggaaacgagctagaaagtcgacaaataagaataaagatgatcatgctgatgtaaatacatcgacgtctccatccattaaaaaattaaaaccattacctaagggtccagctttagcaatgaaacaacaatctagatctaattcatctacttcaatcaataccatatcttctaatacaaccactaacaccaataatattgtccatgaaaaggaatatgatagtatggatgaagatgattgccgtcatacaatgagtgcagttagagtatcattaaaaagattaagacgtggtggtaaaggcctagaccgtaaagagtgggcacaaatattgaaaactgaattaacaaatatcggtaatcatatagaaagtgaaaagaataaatcatctcatggaacatcaccagataaattcaagaaacatttatggtcgtatgcatccaatttctggcctgcatctgtgaaaagttctaaattgatggcaatgtatgataaaattcgtgcagctaataaataaagacatataatgtaacctataactttgcaggcatcaagaaaataaaaaaagattatagtatacgatgataagtacttttatgttcagatatgaactgttgtgtatatattattttacttcattatttttatcttattatgataattattacccaaaatgtattctttttcaaaaagcggttctttcgttgtgtgatgtaagacatcactattgatagaagatagaaatgagattacacaaagccacagatctctggatctatgtattttgatatctgtactttcatttcctctataattacattctgttgaccaatatgacagttttcgtacatagtgatccacagtagaaaaacaaaaaaaattttcgcttcgtttctttttttttttctattttgttttgtttgtctgcgaagaatcatcaaagtgaaaaatttgcgatgctacatttggagaaaggaaaaggacaaccaaagatcattgctctcttctttttaacttcttttcaacaacaactaacacattaacgtttaaagacaaaaaagcttacttgcttgtttgtttgtttatctgtttgtttcttgggttcatttacctttttggttattctgaaatcgatttccgttcatttactactcttatcttttatatctattttatgtattcttattatacaatcctttctgtattctattcacaatctactgtcactttgttatcgttcctattttaccctaagaaggcataactttttatatcctttcttttttttttttatttattataaagagcaatactctaaaaaatacatttgacagtttagtgatatctacttcaactaaattatcaaacgtatattaaactatcaacaaaaaaaataaaaaaaatataaaaaaaacttttttaaaaaaaaaatcaattcttcatttagagagatttatatccaaataaaaatatatttattacatttgtgggtttttcttttatatccaatcgtttaatatcaatattctttctttattttgtttgaattattgtattaaattagatcctatattgtgtgtaactgtattttgttgttatattcttttctctattgaataactcataaaataaaataaaaaaaggcaagagattatacttaacaacttgatctgattgtccatccattttcactcgaaaagaaactttttttattagaaattaatcaactcctttattgaataagacaagattaaccaaataaaaaaatgtctgatattactgataaaactgcagaacaattagaaaacttaaagatttctaatgatcaaccagaatcaaaggaaacctctgctactccatctggttctgaaaccccaagcagtgaaaatgcaccaacttctttatacgttggtgaattagatccttctgtctctgaagctctattatatgacatcttctctccaattggatcagttacttccattcgtgtctgcagagatgcagtcactaagacctctctgggttatgcctatgttaatttcagtgaccatgagtctggtaaagctgctattgaaaaattaaattataccccaatcaaaggtaagttatgtcgtatcatgtggtcccaacgtgatccatccttaagaaagaaaggtagtggtaacatcttcattaagaacttgaacccagatattgacaacaaggccttgtatgacactttctctgtctttggtaacattttatcttctaagatcgctactgatgaaaatggtaaatctaaaggttttgggtttgttcacttcgaagacgaatctgccgctaaagaagctatcgatgctttgaatggtatgttactaaatggccaagaaatctatgtcgccccacacctttccagaaaagaacgtgattctcaattagaagaaacaagagccaattacacaaacgtctacattaagaacataccattagataccactgaagaagagttcaaagaatacttcagtaagatgggtaacattacctctatttctttagaaaagaacgatgaaggaaaattgaagggtttcggttttgttaactatgaaactcatgatgatgctgttaaagccgtcgaggaattaaatggtaaagagtttaaaggccaagaattatttgttggtagagctcaaaagaaatatgaacgtttacaaactttaaagaaacaatatgaagctgctagattggaaaagatggtcaaatatcaaggtgtcaatttattcgttaaaaacttggatgattctattgatgatgaaaaattaaagcaagaattttctcccttcggtaccattacctcagctaaagttatgagaactgaaaatggtaaatctaaaggttttggtttcgtatgtttctccactccagaagaagctactaaagctatcacagaaaagaaccaacaaattgttgctggtaaaccattatacgttgccattgctcaaagaaaagaagttagacgttctcaattagctcaacaaatccaagctagaaaccaaatgagattccaacaagcttctgctgcagccgctgccgccgctgctggtatcccaggtcaattcatgccaccaatgttttatagtgtcatgccaccaagaggtgttccatttaacggaccagccccacaacatatgaacggtattccaccacaacaattcagaaatggtccaatgaactatggtatgccaccacatggtgccccacatggtgcatttccaagaaatgctgccgtcaatgctaatgctaaccagttctaccaacaaaagcaaagacaagctttaggagaacaattatacaagaagatctcagccaagaatccagatgaagaagctgctggaaagatcactggtatgatcttagatttgactccacaagaagtcgttgctttattagaaaacgaagaattattcgaacaacacttcagagaagcctctgctgcctatgaatccttcaaaaaggaacaacaacagcaacaggaagctgctgccgccacatcagcagctgaaccacaacaagaaactcaacctgtctctactgaaacctctgaataaaaggtgtctcatttctatgtacaaatatgattaaaccttttttttgtcttttcttatgttagttggtgtatgtgtcttttattaagtttattaaagacattcctatatatatacatatatacatatatatattatttatcattattttataatttttattatttttatactgtttgacgttgtatatgttgtttcttacttttaacacatatatatatatatcatagtgtgtcattttattctaatgtcaatgagataacctgaagataaactaataggtcaacagtcaaagggaactcatgaaggatgtataaaatagttaataatacagaaaaaaataagtaatatttttttctagctttataaaaggtattgtttttttgaaaaataatagaaaagtcggaatctttttcatgaaacaatggaaatctttaggaaaataaataaataaaaagttaatcttgaataaacaaactctcaatacttttaacagaaacaaaaaagaaaaataatgaacaacattaagactaattttaaacaagtaaatttatcaaatagaactttcttttcctgatctcttagttctgattcagctgaggtattattctcgttatcttaaccatcagaactatttttatcctaattaaaaatttcattttctttagtgttctcaatatcaaattcttcatgctgaattagtatcgaattcaacctttcaagcctatcatagcttaaaaatatacttaccagtagtggcaaagcaattcaagtttagaatttaataatgacattattttgatatttaacttttaaatataacatcttaataaatatctacacgtgaagtaattattaaatttttcatgactacaatcgtaaacccaatattctaaatcaatatagtattctcttccatcaatactattcttttcaagttctttgcataactgattaatatattttatcatattcgttctactaagcagttggcttactggcagattctttggataataaagataaaatagttcttttattcaacttggaattatattgcttctttaccttgtcacccaagacaaaaagaaagatgtatgatcttaatgtcctttattatattaattgattaaattggcttctttcaaaaatccataattttgtttctaaattcgttatatttttagttgagaaaatttgttaatttggcacctcaatcaattaagtctataagctcaagaaaattgaaaaacatgtttattaaacagccaattcctctaatcctattagtatgaaaacatattcaagagttacatgattaagaacatactttaattcgattttaataaaatcataactgttggtaattttaaaatctaaactaaaaccatacttaaattccattagatataattcttttttatgtttaatgtttctgcgacatgctatatattgagagtgaaaccattttaagttggttagcctgttaattctaaaaagcttaattcaatataaaagtttgacgagtagtataagagaaaatagcaataatgcttttcagtgtgctagttaattgttaatcaattaaattaaaataaaggtgaagcatgttataaggaagtgtagctatacatttgtaaaattactcacttatactttttttgtgaatcaattctgttacggaatctgcaagggtataggcaaaatagatttttggataacaatagaaaaggtttgttaggctgattatatttgcattaactataatttctaaatatattgtgcatgtatacactgtatatctacccaaatcattcattataaagatttccttttggatggaattccttttttaaattcaactactgacttcaagacaaaatcgttattgggaaagggaatttctcttgtactatcaaatttttttcactggaattctctctttttttctaggtagattctctgctcttgtaaagacataacatatggttatttacacacatatacacacatacatatgctggtccgtagacatattaactaaaatttcctgtgatattcgttttatccagaaaatccataatgcacttatgatttccatagattgaacatgatatatatatatatatatatatatattataatttatttcaactaggtgaaaacttaataataaatcgctagagtatggaagaaaaaacaataaaataaactagatattattgaattaaaaacatagctgtatcaaaatacaatatagatacaaaaaataaaaaggaagattgaagagagatgcagatgggggaaatagagtattcttaattattatgatttaaaaagggaagagtactcaactgatattcagtctgaaatagaaatttattttatataatcaacaaaacacaatttaaaaccctaacaaacatttttggttagcatgtttgaaaacgggttatgtggttctttaaattgtatttaggattgtcaatataaatccttttatgcaatcaatattttcagaatctaatggtaaatcttatcatctggacaaatgtcagtattatgaagattagcaatagtgaaaaaaacagatatggagtgtcataaaaccaacaacaaagaattgtggtaaaagaaatttaagaatgaacaaactagaatagcaaatgcaaaaaaatccactgcaattaaatataccaatatcaaattaggtataattttaatttagctgatagtagtagaagggagaaaaacaatctgaatattaaattaccaaacaaaaaaataatattaaaggacaacaattgaagttaaatataaaggaagatggaagtctctgttaaaaaataataccaaaaataataatggagatatgtaaatttgaagaactaacaatggatctgatttaataaaatttctagaggagttgacagaagaaaatcgtatgagcaatatttggccagaatactattcaacaattttacttctctatatactataaaactcttctgaaaaaaaaaaatcagttcagcatgctctaatatagagttgtggttaggaactctaaataattctatgataaagattggatatatgaattccaaccttattattaaatgttatcaattgctgtaagacttcactttccttaatttctcttgctatttgtctacttttggtattccagaatgccttcacgtactcaacagtatccctttctaattgaagcttttcttgttcttgttgctgtataatttgttctatttctaattgcatatcataatatttttttgcatattcttgtgcatatcgtaatgtccgaggatgaacacctgacaatggtacctcaccactctgtatctcccatatggttacagatggtttttgacgttgtaaaaaattaaatcttaactgccaggatgagatttgctcactctgatccctcagcagatcattttttactgtccagggatttatttttgaaaaatgaaggattggcctctcgttttccttgggacgcaacctttgcttttcaatctggtctaattgccatttatatagttcggttttttcatttcgccgttctctttctcttagtatcagatgtctttctcttagtatgttttctctactttcattgtcttcttccttttgcactttcaatacattttcatgttcttcaatgttttcccctaagtattgtaaccggtataataattctactagactatttacttgtgctcttttttctaatctttttttttgtaataaagtttttagtgaatctatttctgtactcagtaattccatgtattctaattctaatggatcaaaatttgagttatatttttcaactttttttagtagatgttgcttaatctgcttaatttcaaatactgtctctttaagatttttaatttgttgcctcaccttataatttttgcatgccgtggcatacagttttatatccaaacctagcacatcatctgttttcttaaaagattgaaaaacaggagcaattttttctttaaaaaaatattttatcttattcactgtttcttttcttcttctaccacgtaattgttgttcaaccacaggtgtatgttcatcttttctctcaacattgaaaaaagttctggatttatctttaataattaaatgattatctggttgagttgtttcaataatctctccatttgagaaatattgagtctcttgaaaaactaaaggtctaataccttttgctgaagagaagttatcatttttgaaagattcaacattaatatttttgaaaaaggatttaaacttagataaatgtttctttgttgaagatatcttagattgtatttcttctgatttagataccaccattgccttagtaataaataataagtgaaaatctatgaaacctctttaaataaacttttttttgttttaactgagatactaaaatgatatatatatagtgcctcgtatcagaaaaaaagtctgtgttattgttagtacaaagaacgacttaatattaacaaggaaaattttcaagaggaaagtgtaaaagtgaaatgtagaagaaagaaaacaagagtgtgtttacacttctcttttataagtttatattagaaataattttttaaaacaagatatgtatttagatattgctataagcaaaaaaatatattagaaataaaagaaaaaaaaaaaagagaaaaaaaaatagcaataaagataataataaaaacaacaacaataatgtataaaattatttagaaaaaaaattaaaatagccaaacttggaaaagggtaggtaaaaatcaaactctatttacttcaaaaattgcagttctcattccttaagttttttttacatgtgattataagtattcatttcttatcttatgccagggtgtcaatatttaattactgacacttgccattttaggtaagagcgtctgtgtcacaacacaaaaaaaaacactgtccctgctaagatattgtgtatgtttcttaattgtggagatatctaaacctacacttcaaaagtggaataagaatcttgatgtgggggatacaggtttaatgctgcaaaaaaaaacaactaatatataagataaattcacttggtattctgaaatctagacacatataacattgtgcgttatactacatagccaattctaaaaatatgtacaacttagctcaaaaatctaaaagttcttcctattttatatacttttgtgtcctacatcaaatattttttatatgtagaacttctaattatttggtatgaaaaaaatagttttgtggaaaagaagaatgtgagtattgtgataaaaaagttttttcgaaaaaagtacctatatgctgaataaaaatgaactgtgttaaagatcatggatatttttttttggttgataataaaaacccttacaatttttaaagttagctatttgttccaattttaattttaaatgatatagtgaaatatatgataacaaatatatgataaaactttgtatatgagaataaatatgtatactattttaagattaatataagaaacttggctccgccagtttgtttgtcattaaatccatatgcatcctcttattatttttatgttttttttctttttatatctatcaacttaatttataacagatattaatctaataataatagagaaaaactacagtctagatgtaagggttattattagttttatattaaaatacgaacattaattatatgtataaacgcttataaattgtatgatattcgattctaaactaataaatagattatttataggtattctagttatttttcctctaagtgaaccttttatatagaatatgattcaacgactaatatattgtatttatatcataaattcttctaaatacttattacataatagatatgaatcacattaatatacttatattcaattcaccctctatgtacggtgtcaccaaaaagttttatcattagaattaaaaacagcttcctatacttcttaaattataattcgtcttttatatgtatataaatatcctaatatttattaccttgctcttacttttatcttttgtttctataaaaataaagtaattatgaatatcgagaatgaaatatatagtctatatgacttaaagatgttaatattttgcccttataattctaatatcccataagatttgatgttgctacataatatttcattcgattctatgtcaccattctattttgcttaataacgctatttacaagccaaagtttaattctaaataataaaaacaatccattacaaactttttttaacaacacactgtctacacctatcaataatatttaaaaatactatcaagtgttatgcaatatcttattatatatacaatatatatgtgcacatatattacaaaattaacaatttcaaacttttcatagtaggattaagattacttattcatgactattattatatatatataatcttttgcatttccaataaaaatattctaatcatataacaagagccagccaaacccattaaacaatatgattaacccaacagaaacctgattttctaggttacatagatattattttttgtggtataatgcataataaaatataaagtatatggctattgtttttttcattttatttatctcctctttcttttgttaaaaaaaatgaacaagttttgttttacatttactgtttacttttttttataaaaaactctgaaaaaaaattctttttttttttttttttttcttttctattcttaaattaagaatatgtcttttggaaggaaactattagaattaatatattattatgagaagaactattaaggaaaacatgtattactcatgttgcaacaacaacaacaacaacaataataataataatactagtaataataatagtaactaatagaactaacacaattacaactctaagaattcttggtacatctttctttttgtcttttctcttctatctcttcttttcaagtttatctgtatgtagtataaggactgagtaaaacgagcaaaacgagcaaaacaagtaaagttatagaaagtttaattctgtaactctgattgctctgaagatgaccaacgaatctctcgatattgttttttcaacgatacaccgattttttttttcgatgtggagtaatgttattattcttttttgatttataattgcttttttctctggttcagccttgccgttaattttttgtaagtaaatcattgctatatatatatatataaacacacaaacaaatatatgtatgtgtgcatatgtgcgtaaaatgtctagatgttgtgtctttacaagaaagagccgaaaatcaaactaactttatgtatctcatatatttttgtacatcatttttatatgtttttacgttagataaatccacaactaaatcttgcaaagatggattccaataccctttcatggaaggcggctaatgccattatatggccaacatatggtgttttattattctctgctacagcattagcatattggaaaagggattcaaaagcatttttggctgcaaatgggacacagaaagccataccattatcttttaattttgtagcatccgcacttgggtgtggtgtcttttctgcatatccacagattgctaatattgctgggttacagggtctgttagtctatgctattacaggtgctttacctatgtttatgtttgcatttttaggtcctatcattaggagaagaacacctaaaggttttcttttgactgaatgggttttccatagatatggtcttatttgtggatggtacctaagtgcatgcactattttaactgtgtatctttttctggttagtgaaatcagttcattaaaattttgtgtggaaacaatgactggaatgaaagctatcgctgtaattattattgaagctgtggttacgacaatatatactagtgtcggtggatttaatatatcattcttgacagattctcttcaggtcactattgtttttattcttttaattatcgtctcctgtgctatgggcagctacattcatattgacacaagtaagatagggccatctgatttattgaagcaaagtaaattaggttggcaattaatttatatattgaccattgctatatttactaatgatttttttatgagtggattctggcttagaacctttgcatccagatctgaccgtgatttaatgattggctgttctattgcatctgttattttgttcgtctttgtcagtataattggtatcacggggttcatcgctgtatgggcaggatatatacaggtagatgatgtaaactcagggtctgcgttttatattcttttagcacaattaccacgctgggtgatgggtttcacgttagtttttgtcattgtgctgtccacctgcacatttgattctttacaaagtgctctagtttccacgatctctaatgatgtgtttagaaacagattaccaattctttgggtacgtggaattgtggtgttgattatgttccctacagtaattgtgggcttaattgcagaggacattcttatgatatacttaattgtggatctgctatccagtagtattattccagtattgattattggtttgtttcctcaattaaatggatactggactacctgggaagttattggaggtgggctaggaggactgttaactacatttatttttggtactatctactataaatcagcactagaaggagccagattattgttgatctggaatggtttgtatgcacgggattggagcacatttggagcatttgttgcagcaccagtaggcggttttgtttcatccggcattattttgatgatcagactaagtagtattaaattatatagttttggaggaatgttttgtcatcaatgcaattgtattggaaagattactggtattactaaattgtatcattttattaacaaatgggaaaaaatcttagtgacaaatgatgcaacctacaatcaagacaataacaatgacgaatcgatgatctttactgaacaagaagctgtcccatttaagacaacatcatatgcaaattcaatggataagaaaaatatctcagaggcggaactatcacttaatgaatcggtatgacatatagtgatgtgtaatactacatgctaaaacaacataatacaaaatagaagccagaaaattgcaacgtttttttacacttaaactcttttatgtcaagaggtattttgtttaatgaggaaacaatactgatacaaacaaccaaacatgcaaagtttagagaactctctaacattattagcatacctttgtaaataaagaaaatattcatagaaactaacatcgttgcctcagtgatttaaatataataaatagagcatcagaaattaatatttacaatttcctgttgggcacagtgttggtaacgaatccaaataaaatatgtaaatgttgaattagataaaaaaatatatgtgttacaattatctgttacattcggtttgtaaagttttgcaactgttgaaatttattttgcttttttcagcatttctttaaacaaaacaactatcctatttttgccaaacaatactttattaaatattgttatgttcattaagttattaaaataaaaccaagtatttatttgaaaatataataacatcatatatttctttaccatttttaccatcatattttggttcagttaaattattgttatcattctacattctcaatgaattcacagaaacatatcttcatacacctttttgttttttcttcaatttttattctatttctgtaatactgtaaaatagtcctttatcttattttgctctaatcttacacatattcctaatttctagtttttagattcctcattatccattactttattgtctattaccttttgagtagtgatgaagttcaaatccttttctctgatgcataagtgacacaatttttattatctcccattccccagtccctattgcagttataagataggcaattaaatttttgcaaagaaaaaaaatacaatatcatttttttaacttcatgctaaataaagtataatcctaagtttaatctttggtagagaacagaatttaaataagtaaattccataaataattttaagggtctctttatataaatactgttgctctttcttcaattaatgaattttcatgcaaatacaataaaatatatatttgacaatatttaatatattgtaaatactttcttcgcccaataataatgacaattcaagattatatatacaattgtttgattatgactttttgaaacttttggtgtgatatttataaatgcacttaaaatattgctttgtaacattttgtaaaatatggtattcaaatgaatttgcaaagaaaagacacaaatgctgccggtcaaaaatgatgatggtagtctctgtaagagttgttgtatgtaaatggatggatcatatcaattagtataagtataaacactcttacgtaagccctatatatcactaattaataaccctgatatagtattattacttcttgttgttgttcttcttaatcttgtatgatattaagagttacttcttaatatcattactaagatgtatttaaataagatgattacccctggcatatctctcattaatcaaaggcctcttgataagatctaatataattatcactctctggaaatcctccaatcagactcaataccttatacgagccattgcgcatatggctgtaccaatcctccacccagacactcaagcgttaccctcgaaatggcatatctgctggatttctagttaggttccttacagtctcatcgtaatttaaatttaataaaagttgcaagttaaacaatcaatatttttggttatattatttttggttacttgaaaataaggttcattgttatttagataacaattaaatcttatgaaattaaacaaaaaaaaaaagaaccactattaaaattcaagcttctttaaatgcccagatcaaacataaataattaataactagtaagtttcttctatgcaatagtttaattcttttaagtttacgaccagaattgacacatctattcaccattgttttcaaaaatagcaataaaagaaaactggcaaaaaaatacaataacaaaatatgcaatcgaagctaaaaaacaatacagtcttctatcattaaacacgaattttcaaaattaaaaataccattataacttttttgatcgttaatagaaatagtgactgttgaataaactgtgttataaaattactacgttgaaatttgaaaaaaccggtgttcaaagaagtttaatagttgctgaatatatattctaagatgaaggactgctctatcaaagatacatttatagaaccccatgcccttgcaatctttttattaaatacttgttgagatcttccccataaccgtccaatagacctcattaaaaaaacaagaacaaaactctttacggcttaataaggcttacaacggaatttgttaatgcaaaaagtccgtattacgggttttccaattcaacaaggtttactaaatccgatttccatcaatcttcccttttttctcttcggccagacgcgcatgtctgtgctttttttttttttttaattttattttttaattttgttttggctctttttctatgtttgtttatacgtggcttgataattaacgttaaatgcaaggaaatatataatattaataatgacttccttaagaatccatcggtcctgaaacaacgtagtaaaaattttttgaaggcagtacgtggaagtttgaacaataacaattaaacaatcttctgatatactggtattagctacgattacagactactgaataaaaagaataataaaaaaatagttatatgtttagaaaggtagtgatatcttctatcatctgttgaatttctttttatatcacccgaacaagacaatatttaattattttatataacttgataggacaaaagaaggaaaacaaaattacagaatagttgattaataattgacatattataaagcgttattttctttttcttttttctttttcagagaattggataggtacagtagtacaataaaacaacattaacagactataaattctattaaggatatcatagttatatgtaatagtggtctgacctacctaaatttacttatcccaccaacgtacatacagatagctttgtaaaatatcattgtcatcattaatactataattgctatcttttcgctatcttttcgccttctctttttgttagcttttctattattgagtaaatatagcaataacaagaataaccatggagattgataagagcaatccatttgcagatgatcttaatccatttaataactcaaatgggttagataccagcaccaatactaataacacaactaatagtagcaatgctaatacaaagaataataacaacaaaagcttgacttttgataattatttaacaaagcacgaattatctgataatgactcaattatgcccaccccaaacatagggacaactttaaatgaatctgggacatttgatgatattgaattagaaaatgataataatgaagtacatgaaatgaaaagattaagaatgggtactcaaagaaataaatttggtagaaataaagtgggaagagttaaaacactcaaatgggcgaagaagaattttcataatccctttgaagatctattgaaagaagaagatgcatttgatgatgctgggttaactaatagagctgatgaattaagaactgtgtatcataacatgccgcttcctagcgacatgttagacgaaacaggtaaaccagtcgctatttatgctcgtaataagattagaacaacaaaatatactcctttaacctttttacctaagaatattatgtatcaatttcaaaatttcgctaatgtttatttcttaatgttaattatcctaggtgccttccaaatcttcggtgtcactaatccaggcttgagtgctgttccattaattgtcatcgttattattactgctattaaagacgccattgaagattcaagaagaacagttttagatttgcaagttaacaacacaaagacgcatgttttgacaggtgtacttaatgaaaatgtctccactgataatatttctctttggagaagattcaaaaaggccaatactagattattgtttaaatttattgaaatttgcaaagaaacttttacagaagaaggtaaaaggaaacgtgctatgcgtaaaagaaatcacttacgtgctcaaagagttgctgctacaggcggtggtgttgatatgcctcgtggatcttttgattctatgggtagttaccgtttttcagcagattttggacgtccctcccttgattatgaaaatatgaacgaaacagacacttatgatgaaggtcatatcattgatacatcattacctgtcagcaatgatactaaatttactaaagatttttggaaaaatgttaaagtcggtgatattgtaaggatccataataatgatgagattcctgctgatattatcctattatctacatccgattcagatggtgcctgctacattgaaacaaagaatttagatggtgaaaccaatttgaaagttcgtcagtcattaaaagtgacacttgacattaaaagttctagagatattgcaagaaccaaattctgggttgaaagtgaaggccctcatgctaatttatattcatatcaaggtaatttaaaatatgttgatacaaaagatggggacttaaaaaatgaacctataactataaacaatttactattacgtggttgtactttaagaaacacaaaatgggcaatgggtatggttatctttacgggtgatgaaactaagatcatgttaaattctggtgttacaccaactaaaacatcaaaaatttctagacaacttaatctctcagtctccattaatttcttaatcttatttattctatgttttatctctgctgtgatcaatggtgtctactatcaaaagagtcctgtatcaagagatttctttgaatttggttcaattggtggctctcctgctacaaatgggtttatttcgttttgggtatcagttattctatatcaatcattagtcccaatttctttatatatctctgtggaaattataaagacagcacaagcagcctttatctatggcgatgttttattgtataatgctagactagattatccatgtacaccaaaaacttggaacatatcggatgatctaggccaaatagaatacattttctcagataagacaggtactttaactcaaaatgtgatggaatttaaaaaatgtacaattaatggtgtttcatatggtagggcgtatactgaagccttagctggtttaagaaaaagacaaggtgtggatgtagaaagtgaaggccgtcatgaaaaagagggtataaaaagagacagagaaactatgattaaaaagttactagatttatctgaaaactctcaattttacccagaagatattacttttgtttcaaaagaatttgtggaggatttagcaggtgctcatggcgaagaacaacgtaattgctgccaacattttatgctggctttagccttatgccattcagtgttaactgaaaaaaataaacttgatcctaataaattagaccttaaagcacaatctccagatgaagctgccttggttactactgcaagagatatggggtttagttttcttggaaagaccaaaacaggtatgattgtagaaattcaaggtgttcaaaaggaattccaaattttgaatattttagaattcaactcatcaagaaaaagaatgagttgtattgtaaaaattcctggattaaaccctgaagatgaaccaaaagctttattaatatgtaaaggtgccgattctattatttattcaagattatctactaaagctggtgccaatgatgaaatattattagaaaaaacagctctacatttagaacagtatgctacggaaggtttgagaacactatgtattgcacaaaaggaaatgtcttggtctgattatcaatgttggaataaaaaatacaatgttgcagcagctgctttaactaatcgtgaagaacaacttgacgctgttgctgatgaaattgaacgtgatctaatcttattgggtgggacagccattgaagatcgtttacaagatggtgttcctgattccattgcattgttagctaaagcaggtattaaattatgggttttaactggtgataaagttgaaacagccattaatattgggttttcatgtaatttgttaaacaatgatatggaactattagtcattaagacatctggagatgatgtaaaggaattcggagaagaccctgctatagttgttgaaagtctaatctgtaaatatttaagagaacactttggtttaagtggtaatgataaagaattagatgatgcaaagaaggatcatgagcatcccaggggaaatttcgctgttatcatcgatggtgaagctttgaaattagccttgcaaaatgatgaaataagaaaaaaatttttattattgtgtaaaaactgtcgtgctgtattatgttgtagagtatcaccttctcaaaaagcagctgtggttaaattagttaagaacacgttagatgtaatgactttagcaataggggatggttccaatgatgttgccatgatccaatctgctgatgttggcgttggtattgctggtgaggagggtcgtcaagctgtcatgtgttctgattacgccattggtcagttcagatatttggctaggctattactagtccacggtagatggtcatataagaggttggcggaaatgattccggcattcttctacaaaaacgttattttcactctagcattattttggtatggtatttacaacaattttgatgggtcatatttatttgaatacacatttttaatgttttataatctggccttcacatcattacctgtcatattccttggtattttagatcaagacgtcagtgacactgtttccttagttgtacctgaattgtatcgggctggtattttaggtttagaatggaaacaaacgaaatttttatggtacatgtttgatgggctttatcaatcctgcatttcattttttttccccagcgagttgtatcgtagatcattgatcgttacaagaaatggattaggcttagatcatcgttatgaagttggtgtcatggttgctagtatagcggtgatatcgtgtaacctatacattctattacatcaatacagatgggactggtttagtgtcttatggattacgttatcttgtttgtttttattcttttggacaggtgtatggtctagttcattattatcgaaagatttatttaaggctggatcacgaatatatcaatcgccttcgttttggggagttttattcgttggtatcttctattgcttggttccaagatttacctatgattgtttaagaaagtttttttatccaaccgatgtggagattgttagagaaatgtgggcaagaggggatttcgatcattatcctccaggttacgacccaaccgatccagacaggccaagaatacttaaacccggcaaattcggtgagtacccggtcggtggtattatgctatcggataattatggagaaggtaacttatcacaagacagtgttgtcactgaagagattccgatgaatattatgaataatccattggggtcgccagagatacgtagggttagtgagaataaggattggatggcgtcgccaaaggaaacacaagacttattattctcaccagtaatagacagtgatgacaagcgtaataacaacaatgataggtttgagactttgaatccacaaaatggttccaatttaagatacagtaatccaatgaataagagagatactagaacttccttagacttgacaagagagcacatgttggctaaccatgaattagacaatagatattccgtggatagagcacgtatctcgttggacttacctggaatcactaatgctgaaagcttattagaaggcagaaaaagttttgccatagagcgttaagtaagaatcaaccatctaactagatacctatatatatatatatatatgcatgtcatttagacatatcaagtattgtaacatattacaagaacaaaaaaaaagaacagaaacgataaaagattagcgaaataggggtaatataactgagcattagggagagtaaggaaagaggaatgattctaaaacattgaattttctatatgatggtctagcattttagtgtatacaatgaaactgaagtttttgtaattgttaatgctagacactctttgaactccaagtctccatatactttctcaacttttttactacattttactgcctctacatggaacttatcgctccccccttttttatactagtagtaaatactgttggagactaacgatgatcttaacttaaccgggctccaaccaccttgaaaccaccaagaaagggggaggaggggaggcattttgcaaccgcagtcttcgaccactgtgcccagaccaagccagtccatcccatccaaatcgagcctagactggtccaggttaggttttagacagacaggctgatagactccaacagagaacgagacgggaagaagaggcgaggagagaagaggcaaggggagaaaacaacaggaagtgagaaaaaaaaaaagtaggagaaaacgagcagcaaaaaacgagcaactgaaatggaagacgcaaatcaaaaatcaaaaatcaaaaatcaaaatttgggcacgagagatacacccacacacccacagagagacaggcaaagaagaaaaagaagaagacaaaaaataaaaaaaaactcagacaagggcttcgttttactagtgggcattttcttttcatatattgccgaaaatacgtcaaaaaaaaaaagattggagtaaattaaaatcaaataagtgaaggtttggatataacccattaccacttgacccaacttttatttgtcaaagaatctctttttctgttttttcttttttcagatccgtaaaaattaactgagagaggatccattgacaccgttactgtgtttagactctaactttaccctccatactagttctacctgtaatcagaaatacacatacacatatacatattcataaaaatacacacacttatacatatatatcccaattggtagttaataatagttatttacatttaattattaattcgatagtgaatggaaaaagcaatcctttcaatatactctaaggttaatttgttactccttatataagaaaaaaatataaatactttacgcttctcatagtccattacacaatacctaagacatacctaactacatataccaaactaaagcagaaataaatcatcataaaagactgaaaaaaagagaagaaaaataaaaatatttcagtataccattactgacgaataacaatcaaaaagtgacttttcctttctgcctacttttttttcttttcttttcctttcttttcacatatattaaatacttttagatctgaatcattagttatttatttgtgaaatacccttacttctttctttttgatgaaaatgggtagaatcgtcagtggtcataaatctcaagatagtcctaatacgaatatgttgaaaagttcagagtctatgaataaatggaaaatcccacattattataaaagattctcaaataacagtcctaaccatcaccattcatcatcatcatcatcatcttcttcttctttttctgccactactagtactactaccaataacaataatcacatacaagatggttccttctataaaattggtaatgtaccgaacatgcaatctccttctgctctaggtattataaatagtcctaaaagaatagtgttggaaagtcgacctagaaacaaatccgtttcttcagtgtcttcaactaattcagtcaagaaatattcaaagaagaaaaacaaaaatgatatggtatttgttaactatactgtgcaagacactgcagataataaaaatgctttgcagcaactaacaccgtcacaatcagcaactgaggcatttaagaacgaaactgtatctcccataataaatgaattcccacaacagtcccaacaacaacaacaaccttttccgatatcacaaaaattatatagaaaacgaatgttaaaaatttttggctcttccaaacatcaaaaatcagtaccgattttacatcataatactactgatgaagcatctgtagctttagaaagatctttatcaggttctaatctctacaattccaacggtattggtaaaaaatcttataatgcatttcttaaatatgataatttaaactatcataataatgacaatactacagctgtcaatacaacaaatactactattaattacaataataataacaacagtaataacaataataaggtttcaattagtgagaatacatcaactttaaatgaaatagatatttctaatatggaatatgttccaaaatctaaaaatgatccaactttagctcaaccacccacaacttgtaaatcaaaactgatcctgaatagcatgaataatatgacacaatatatcaatcgtaaatataatcaaagcagtactaccactaaaaatagcaacaacaacagtaataccaataccaataatagtgtaaacaatacctttacaaacaatagtaacaataacaacaatatctacaataatcgtaataacattataagtagatcgatatctgttaatgaaggtttgaaaatcacacctaatggattaggacaagttattccacagtatattgagcaaaaaagttcagaccctaaagctgtagaagacaacgatgcctctgttgcatttagtaaactgatttctaaaaaaagaacagatataaatacctctccaaaacctttaattccgccacctatttcaggtattgataacacggtctcaagtacaaacaacatgagtggaataaccatatctaaacctcatagtcaaagaaccgcgagtgtcacatctcttccctcaaacaattcaagatattcaccactacgaacacaatctcctgcaaggcctagatcgtccacaaggggttcctcaatgcatcggctatctcgtgatgttagtacaatatatagtcccaacactctatcacatgatgttaacccattactagaaactgatacatttctggattctcaattccctactgccagtaatactctaaacagtgtctcaaaacgtgtgtctgttttatcttcaggtagttcgacaaatgccaacaaaataggtcatagaagaaaacaggagtcaatatcagataattataaatttatttccacttttagtaacggaacttatagtcgtagcacatccacaacatcagtcaccacaccaaacaccactttaaatacaaattctcaaactgccatgacttcatcaggtttgttattgacaccaccatatgtaactccctcattgacacaaccaccaaattccttatctacagtgtctacacctagtggtattgaattgtataacctaaatgctattaatagttcttcaaggcaaacagcttataccaaccattttcaacaggggaaacaatcaaatgatatcagtgatgcattaacagattttgctgaatcattaccattggttaagacactatcaaaagaaccaacaaacgccaatatgaacaataatatgaatttactaaattcttccaacaataacgaaccaaattttgtttctaaaaataattacaacggtacctacaaaaccacggataataatgagaattttcataatgatagagagaatggagaatcttcaaatgtatcgagaactgatgcattttcctattttactgatagtaacgctaatagtagtggtgcagaatctgttatggccaatatattatctactacttccacaaccactaccaattccatacctcagaattttcttatcaatgacaacaagactactgctcatctactttccagagatatatgcaataacaatttattccatacgattaataatctaaatgaagatcataattacaaacataataatattaaagaatctatggcagaatcaatcagcaccaataataataataataataataataataataataatagtggcagtgctagtcatcataattttaatgagacgggaataaatgatgaacaattattagaacaactgtatcttgaatttaattttgaaaatccagatgctttcttacaagaacatgataaagataattcaataaataaaaacaaggataaaaaccttagtatgacaaaagatcctaaccaagatgtgaaaatccaagctatgaaccataatggcaatgaacaaatatttatacaccaaatggattccacagcaacgtcagttgagaatttttctacaacttctgtttcttctactgtacttaaagcaccaaacaataacactagtacaaatagtgtcacaaacctcacaataaacaacgatctcaacgctacatcattacttgtatctccaaaccataacaacaaaaacataaatttagtgcatgacgagtcaaatattcaaaactcccaattatatgagaacaatttgattgctaatgaatttaatgatttaattccaatgactaacaattttggtaatgataatatgaatgattttaatagtttgcctatgaatcaccaagatattgatagattgaccaattatttttttgataatatgcaaaatagaaccacttgagcatgttatgtatttgtacatatacatacatacatacatacatcaatttatatagaatttaatattaatatatatttatacactttctttatgtaatgataaacgataacgtaatattaaatataaaattaaagaaagggaaaagggtggatatgcatgaaatgaagttgtattattaaattaaattaaatcttgtctaaatgcagtttgataaaattctttgtatatatttaatcaattgctcctttgtacctgttggattatcgaattgccattctatttgtttatcattaatattccccatccagggacctggtttcatgttaagtatcttttgtaaggatttcccatcaatcaaaggtcttaatgaatgacagtcttgtaaattttcttgtagaatcatattatagaaactatcatattcctgaatgatagtaggattaatcttttgtaaaccatctgaattcaaaagatcattgaataaagctactaaatgaactaacatccagttacccttaaaggacctgatgaaaagaccaatttgcgatctttttaaaacagaagcactattagtactaccgatattagtattgaaaagagttacaatgtagctatattttgagattgattgtgccacttgcgagaccactgcagcgtcattcttactcatttttagcccatcctttatgatacattcaataacaggggctgtattatttaatttcttttgtggaaatgcaatgatgttcatatcgtggaatggtaacaaagatgatccaagcataaaattttgtctcaattgtttatcagtcaacagtttattttgcaatgagggatttgatttcaatacatcttcaataaaagcgggatattgcgagttgaaccgagacatatgcttgttcaatagacctgaccgataaactttttcaatcttgtcaacattggagaagttttgtcttttgttgaattcgatgacggattcattacagtgccaaaaaaagataacattttccaagtttgagatttggatcagtttccacgcagtcaaggggtttggaccggagaggatcttttccatctccacaccgatccgctcacgagagatttttgagttgaaggatttgttgatttctgggtcgctcatttccttcaagacattgcggtcgattttgaagttgaatcttgaagcaaatctaatcagcctcaagacacgcagggggtcatccaggaaagtttgttttggtgggagcggggttctcaagattccatttttcaagtccgacaaacctttccctgtgaaatcttcgatggagtcagtttggatgttgtagaatagggcgtttagagtagcgtctcttctcaaggcgtcttgttcaggggtaccgaagtttacgatgggtattcttgagagttctgtgtactcttcggatctcagattaacgaagtcaacctcgatgccgaacagtttagttgttgctgtttccaaatgtttagatttttcaggatttttatcgattttgtggatggaatgaggttttataccgtattttgaataattttggcgaagatagtcgtttagcccgtgagcgaagagttcaccagacattttatttatagctatatctaaatcatgagatccttgacccaaaagtttatctctaacccaacccccggtgattcttaacaccaatgcttcattgctagcagcggaattgttagtattgttgtaatagttgcagtaatctttcaaaagatcacatattttagattctgtttcactcaacactattctttcagcaactttatagtgctgtgaaggttcagacattgttatagttcttctgttttcccttgttgttgttgttgttgttattattctatatattctgggtttatatgaattggttaaaacaccgatactactaccaaagtttacaaatgatctactaaacattcagatctatttgcataagatggagaaagaaaggggaaaaaaaaagatccgaaagtgtctaattttcttcttgttttctttttttttttgttttttttcctttctttatacacaaacaatataatagtatgtatattgtaaaaatatataagggaacatattgaatcaagtgttaataattctgtgttatatagaagctaaaagcgattattttctaatgacagatatgacatatagtgatgataacaattatgatttttgccggctcgaagttttaatatatctttttttctttttttttttttttttaatttttaatttttcactcatcggataaattaacataaattattaatatatatatatatatgtatatacatttgtatactagttgtataatttttttggggggtttgggtttgaagaaaaaaaaaaggaaaaagagagcaaataaagttagggttgaaggaaaaaaaagaagatacaaacaccaagtagaatagaacaagagaggcgctaccaccatcgacggtaggaatcaccgtcgccatctcctctcccttttacgaaacattgcggaacaggcctcgctatctcaaacacacgacagacaagcgatggtagataggtgatgacatgtaattgcgacacacaaagtctctgatatatatatatacacatatatatatgtgtatacagttacgaaccctacacatctttatctggcagccctgaaccctacgcaaaacaaacaaacatcccctctttttatttctactgttgcgatttgtttttctcttcttctcccttaaatttccgttttcctcccctttttgcccccctcatcactcgaaataataaaacaaacaataaaataatcgtaataataataataataataataataataataaaattttttttttccttcttctctgcgctcacaaaacatttctgtaaaataaaaaaaaaaaataaaaaaaaaaaacagaaaagtaaaaggggagttttcgttttttctttttttttttttatttttttttcttggatccccttattatcaattattattattatcactcataatcacttttctattttatttcattttatttcatttcagaagaccaaaagaaaaatatacagagaaaaccaaaagacccaaaagaactgaagaatcaagcaaagcttcttaatagcacaggactcactagcactaaacactagttattacattttcattttcattttcagttttcagttttaaccatctttgatcaaaacttaattccttttattattatcattattcttcggactctttctttcttctcctccgatatcaatatcaactaactaataaatcaataaatcatttatttatttatttatttatttatttatttatttatttatttatttatttattcatctgttcattcattcctactcataactgatatattccttaaattattatctagaatagaaaaaagtgagaaaaaaaaaataaaagataaaataacatgactttcataccaacagaaattatagacggtgttccaatcttcaaacctacattcgatgaatttaaatcatttgaatcatatatcgatcacataagacattatggtatgaaatccggaataattaaagtcataccccctaaaaaatggctggatctcttggataaaaataaacactacttggatctccagtctttgcaaaacattaaaataaaatctcccatccagcaaaatatctccggtaataaaggcctttacatgatacagaacatcgaaaagaaaaaaatttataatatcattcaatggaaaaacgtatcagctgattacaaactaccaaataaccccagatataaccacgccaccatagctgccacaactaacactacatgtctcaatatcaatgacaacaacaaggattttgaaacctttaaacaaaataatgaagacttgctttatctggctcagtttcatgacaaagaaagaacagattttttagaagcctactattggaaaactttgaattttataatgcccatatacggcgcagataccccaggttctttattcccaaacgatttctctatatggaacttgaatatgctgcccaatctattaaatttcatagataaagacatccccggtgtaaatcattcttacctttacgcaggtgcatggaaatccacgttcgcatggcatttggaagatcaggacctttactcaatcaactatatccacttcggttcccctaaacaatggtattctatacctcaggaagacctgactaaattcgaatctttcataaaagagcaattcccaaacgaattcaaatcttgccatgagtatctaagacataagaccatcttagtatcgccacaattactaagggacaacaatattcgttgtaataaaatcgtccactaccaaaaagaattcatcattactttccctcatggataccatgcaggtttcaattatgggtataacttagcagaagcagtcaatttcgccgatgaatattggctggaccatttcgctcccgtcactaaatcttgtaactgcgtaagggattcagtggagattaatgttcagaaactaatcaataattatagggttaaaaatcctaaatataaaaaaagtataaaaaaggaagataacagcagcaacagtattatcatggctcctttgaataataaccaaacagaaaatcttatacaatctaatgtttctttaagatcaaccagccctgctccaatggaccctttaataaatcagtcttccatcagtagagtatcgtctccgtttctggctaaaatgatggacctttcaaatatcattgaaccaaccttggaagacacaacattgaaattcaataagaaaaaaattaattcgacagataataataatattaataatattaatattaatatatctagtgttactgctaccagtaacacccccacccccacccccaccaccattactactaataaacaaacaaattctaatatgaagccactccaaggagtactatctttatctcaattacaattgcaattacaacatccaagaccatctcttttgtctcaagataatataaatgatcccaaaagattcatgcaaaatcatatatcgaatatcaacaatcccataatgtctccatcaccattgtctccatcgattttaaaggatcagttattaaataataataataatagtagtagtagtagtaacaataacaataacggacagataaatgatgcaacaatcaataatcaattgattcatccaaatcctatgaatccaaatagaccaaatagtgcaattccgttcacttttgatgataacgatgataatctgctagcaatgagtttaacttctttggccaatagtggaaggtcctcacctaagactttgaaacccatgttaaatacatctatagatattaataattctcccttaagcaaaatgttttctaatagagaaggtatcagcatttctaaaacacctactaatatttctaatgacatgaagagaccgactcccttaagatcatttttatcccaaaaaagtagtaatacttttagacctttatcaccattcaacaacttattaacaagccaaaattctaataacaataacaacaacaacaataataataataacaatattatcagtaatgttaacaacagtaatagtattggtaatattaatagtgattcagggaaaataacggcgacgagttcatctagtatgccatttttgaaaagaacaaaatcgtcaaatattgtgacattaaatatatcaagggaaggctcaagaagtcctgttacaatgcttaaccctatgaatacaaacggccctggttctaatagtttgttgaataaagatgattcacttctttcacctactgtttcaacagtgtatccaaatttattcaattcaaatgccagtgatagattagaatctggtttttcatctactacagctactactagtgctactactaacacaacaacagcagcaacaataagaagacaatacgacaaaaatagtgacaatcaatctagtagaaaacgtccaaagaaaaatacagattcatctttatctgtatcgcaggatattgtcaaaaatggtcaaaagacaaatgtcaagggttcttcggttatttcgccaccaggaagattcagtcgtgaagaagtaattgtatctgaatctggaaaagtgtatatatgccaagaatgtaaaagaaaattttcttcaggacatcatcttacaagacataagaagtccgtacactctggtgaaaagccatactcttgtcctaaatgtgggaagaagttcaaaagaagggatcatgttctacaacatttgaataagaaaattccatgtactccaactgataacgaagagagtaattcaacagctaaaactgcaggaaatagccaaaataatgagagtccagcaactgctgagacaagaactgtaaaagtgactgggtcctcatcatcttactctgcatctgtaacaaatatcgaagcatcgatgcccaatgtaagtattggacatgatatggtacgacaagaaagtgagaaaaatgagataaacagtccaccaataaccaattgaatgcatttattctaagaatacattattaataatatacatggatggatgttacataattatgtatgttatttattatatatattattttctttttctttcagttacaattgccttgtttgtttgtttgttttttgttttgctttgtattagaattgatttttttcgtttttgtgttaggtagattaaatagcttaaacattgtgtctgtagttaattgctttctctttcttttatgtcccttggaattaaaaatgcagaatggtcccagaacgcctcccctttttctcaacaaacaaaaacaaaagaaaacacgaaacaaaaaaaataaaaacaagggaagaaaatcttccagaaaatacacaatagactgtataatggaaattacacaactacaagtctcgagcttttgtggccaaaactgaaagaactagaggaactacactttgctcgaccaagatgacatttcaaatgtaatggaaatgataaaagtgatagtgtaattacgcttattgttcaaacgtatttcatgtcaatgcgatgtaacaactatcacacagacaactaaagagaagtctttttgtttttatttttttttttttgagtgaaggaagaagacagaaggcgaggcaaaagaagtattattgtgtgtttacaagctaaaaacttgagatagaaaagaaaaaaaaaatctttaactagttataaataatgaatcaactgaggttattgttgttaggtcctcctggtgccggaaagggcactcagacttcaaaactgttagcacaatttcctcaattgaaagctatttcctcaggtgatattctacgtcaacatatcaaaaacggcacaagaattggtactttaacagcacaattcatcaaacaggggaaattggttcccaatgaactgatcactaaactagtctttaaacatctttccactttaaatgacggttggattctcgatgggtttcccagaacattgatccaagcacaaaatttgtctcaatatctgaatccactaggcaaagatatcaatttagttatagagttggacgttccagagagtgttatcctatccagaattgaggaaagatgggtacatttgcagagtggaaggacctataatgatacctataacgcacctaagactcccggagtagatgacattactggagaacctctagttaggcgttctgatgataacaaattggctatgcaaacaagaataagagaatacaaagccactatagccccattgagacagttttacaaaaataaaggacttttaagtgtcatctctggggattcatctgatgagatctatcctctcttgctggatactgttttagaagtgtcacgtgcacaggagacccaaatttgaattttttacaagaataacattttcttttcttttcttttttccaagaaaatttattgaagatcataaataaaaaaagaattaaagcttgatcaaaaaaaaaaaaaaagaagatcggttagacccatcctattttacacttgtgcagggttatacatctgtattcacacaaagcatgtacatatatacacatatatctatattcatttaaatatctgttagatataaagaagatctatcgaaatttgaaatttatatacatacaaagattatatatcatctttttgcgtattttgttttttacaagttttactgtctttttttatttatttagtaggtttattttcattaacctagcacactaataaaggtttcaatccatttcattaaactggatctctctccctttctctatgtatgtgcttgtgtgtaattaatatcattttatctctgaaatttgttaagacttccatttgatttttttactttctttctttcctattaactatcattatatcccttatcataacccatccataaagcacacaaatatataatatgaaattctatattgacgatttaccagttttatttccataccccaaaatttatcctgaacaatatcactatatgtgtgatattaaaaaaactttagatgcaggtggtaatagtatcctagaaatgccctcaggaacaggtaaaactgtctctttgttatctttgactgttgcttaccaaatgcattatcctgaacatagaaagattatatattgttctcgtaccatgtcagaaattgaaaaagcgttagtagaattggaaaatctcatggaatatcgtaccaaagaattgggtcatagagaagaattcagaggtctaggtttaacttcaagaaaaaatctttgcttgcaccccgttgtcagtaaggaaagaaagggtacagtagtcgatgaaaaatgtcgtagattaacaaacggagttaacaagcgtaaattggaagctgaccctaatgcagatgttgaattatgtgaatatcatgaaaatttatacaacttagaagtcgaaaattatttaccaaatggtgtattttctttcgaaaaattgattaaatattgtgaggagagaaaattgtgtccatattttattgttcgtagaatgatctccatgtgtaatatcattatttattcttatcactatcttctagatccaaaaatcgcagaaagagtttccaaagaggtctctaaagatagtattgtgatttttgatgaagctcacaatatagataacgtttgcatagaatcattgtctttagatttaactaatgatgtactgagaagagcttcaaaaggtgccacaactttagaagagaaaatagacgaagtgcgtagaatcgatgcagctaaattacaagatgaatatgataagttagtgaagggtttacatactgcagatatcatcacagaacaagaagagcaattcgtagagactccagtgttaccacaagatttattgagagaagcggtacctgggaatattcgtagagctgaacattttatatctttcttaaaaagatttattgagtatattaaaacaagaatgaaagtgttgcacgttatctccgaaacacccaaatcgtttttacaacatttgaaacaattaacatttattgatagaaagcctctaagattttgtgcagaacgtctttctttacttgtaagaactttggaagtagctgaagtggaggattttactgcattgaaagaaattgcaacttttgccacattaatatctacatatgaaaatggtttcctgttaattatagaaccctacgaaattgaaaatgcagctgttcccaatccaattatgcgtttcacttgtctagatgcatcaattgcgattaaacctgtatttgaaacattctcctcggttattatcacctctggtactatctcaccattagatatgtatccaagaatgttaaatttcgatactgtgttacaaaaatcctatgcaatgactttagcaaaaaaatcattcttaccaatgattgtaacaaagggctcagaccaagttgccatatcttccagatttgaaattagaaatgatccaagtatagtccgtaattatggttccatgttagtggaattcgctaaaattacaccagatggtatggttgttttcttcccatcatatttatacatggaaagtatcgtgtctatgtggcagactatgggtatattagatgaagtttggaaacataaactgattctggttgaaactcctgatgcacaggaaacatctttagctttagaaacctatagaaaggcatgttctaatggacgtggagcaatcctattatccgtggcaagagggaaagtttctgaaggtattgattttgatcaacagtatggtagaactgtcctgatgataggtattccattccaatatacagaatctcgtattttaaaggctcgtttagagtttttaagagaaaattatcaaatcagagaaaacgattttctttcttttgatgcaatgagacatgcagcacaatgtttagggcgagttctcagagggaaggatgattatggtgtgatggttttagcagatcgtagattctctaggaaaaaatcacaattacccaaatggattgcacaagggctttcggacgccgatttaaatttatcaactgatatggctatctctaacgctaagcaattcttaagaacaatggctcaaccaacggatccgaaagaccaagaaggtgtctctgtttggaatctagatgatcttttggcatatcagaaaaaaaaacagtcaggaactgaaaataaagtagaagatgtcattgatatgaatggagatcttcaaatgacaaattagtaaatacttaaatacataattatacatagatacgtaccaagtgttaagattacatatttgtacgaatagcaatgactatttcttattaacgtaatttggatttgaccaattcttgaacagtttttctctacttgatagacgaaaagttgaagctatttaactccaaaataatacttaaaatctaacatgttgaaataaatttatctcatggttaaactatataatttctataaagaatgaagcttctttatcagcatcttgatatgagtcacatacacaccaaatagtcaaatcatgttttcctactttggaaagttcaaatggtatatcatattgttgagcttctgttgataatgtaactttcttaagagcatataactcacgtttagaactatcacctatgacaatccaccatctttcaattttctcataaggataatattcagaagttacaatcaatgtttctggctcgtcgtctcttcttagagtgatatgcaccataatttgttcatcagttttaaatttactatgttctatagtgtagtccatttcgatattagggtaattgtttataaagtcagccaatttaattaacttttcatcagatactgtcatgatatattcgcgatctttatcttctagagccattacatcatatacagtttcaacttttaattctttgcatttttccaatatatttcctgtaaaaaatggaatttgtttcaatggtgaatcaacatcccaaacagcttgcatgatcatttgagaaagatccattgctatagttgcatttaaaaacccttcacctgataaaatatcaaccatggcattgatcaatgattctgttttacgtagtatcaatcttaaatcatttttaaattcaactgatagagatattctagaaaaatacgcctgtaataatataaatactttataagaaacaatattaagtcttttactatcaggatattgtaatggcaatattttttctatcctagaaagccttaatatgtcatctttctccacaggaataggttcaaactctgtagcataagataaaactaataggatatccttcagtgtggaatcaattgtcaacgttttaacaaaaatgttcattgtaaaaaaagatacactataatgtgaggcaattaaacatccatttaatggggatattatttctgcatttccatcatggttagcttcttttatttgtattaaattcaaatcaatcatatcattaattgtagtttcaactaattcacttaaatatgcagatattccataagaggaattatcagtaacaccatagaaactaggattagcatgtattcttctataaaaatatgaataagttaaccaatcaagacaatcttgcttgttggtgattaccatattgtttatctcattaatgaaagaatcatgtaagaaataatataaataactttcaactggcgcaggttctgaaataaacttgcgatagtaagctttatggtaatcatttgtaagaataaaaagttttcccgctatatgatgattagagctaacacaaccaagaatctcagaaatttcatcagcttgatagttaacatatttatttgttttgtaatctagacactctgtacccaaaactactatcatatctgctttgggtgcatcatatgaaaaattttttgtaatgagaagaatggagaagacaccatggttataaagatcttggataagctttctatcttttttatttatccctgtgtacaatataccaataccgtttaacaaacatgttttcaatgcattgtcaactagagagttgacataattctcaatctgttcaccttcagtctttaacatattccatccaaaaattttagagagagttataatttttttagcaatttcaacacaatctctacgtgaattcaaatatataattgatggtgttgagtgagccttatttttcattttatcaaatgcataacgtatcatagttggcgtgtatggtaaatgattaatattggaaaacgacttaagatgaatttcaactggattaagtctggtatttggaatataattataaacattttccttctttacaccaatccaatcacccaaatcaataccatttggtaaacatgacgaaagtccaacaatcctaatatcattgctaatatgagaatacataaaaataattctagaaatcatattttcatatagatatccaaaagattcatggctaatttcattaatattatcgaagatgaataattcaatacgttggatattcttacgttttctccagttacgtgacaaggcatcaaattgttgtggtgtagctaatatcaaatgactttgagctaagagttttatattagatgttaaattatcgcctaatttattaatagttttccctccagcaatatgacttatttttttattccattggtcataattgttgtttatatgatcttgagaggtactgatatatacagctctacctttattttgtctccaatggtttaatatcgcaagtaatgccatatttgtcttgccagatcctctaggacaaccgattaaaatattttcatttgattcaaataaaacaggaaaaacgtctttctcaatgtcattaaatgtaatacctttaaatatgtcgttgagttctttataccctaacgaatctactataactttatcaacatcgtcaagttctctgcccaacggaaatttttttggtaactttatagtttctaatacgataggtgaccgtgatatacaatgccaccacctttctgagataacacttatatatactgtaggaggtaaccgtttttgttgtgagggtgatatttggagatggaaagataatgactgttcaatatcgatatctgattcctttattaaaattgtatcggcatagagtatttccctgccatctgtatcctcaagaaatatccaaaaaatttcgcctgttccatgaatgccttcatcccatatccaatgtggtaaaatttggatttcaaatgttaacaaacttggtgttaatggttggattattgaattaatttttacagttggaaatctttgaattaagtcgtataccaattttgcgtagccctcaactcgtatagcttggcccaattctgaaggtgaagtaaattcaagatactttgtccatggtaatatagctgattcagcacgctttatcacttctgtagggcattttctaaattgtcttaaaggtgtgttagtggaccacatcttccaagtaatagattttgctaaacttaacagtaccttacttggttgagaccatttcatccttaagcataattcaaacatagcccttattaatcgtcctgcattttgttgaataaataccatgtcagcattcagtgcaaatccatcaaattttaattgagaaatgtatgcttgtaataatatattcactttagtagttggatgagtaatattatctttaataggtattggacatttgttatataattcttgtaactcaattttgtcttcttgacgaatagatatgtatttaaattcatctgaaagagaaaatattctaaacatatctataatagtactacgatcagttaactccctgttgtaaatagttattgattcaggtttaatatagaagtaagatgcgatacggccaagttctgtaggttctacggaaccatcttcctcattatatataattaattgttgatctcgtaatttagtcaggacactatgcgcaatggatgctctaaatgatgaaagagttggctcatcagaatttccaaatgtgtcaaccttatacaaggtaggagacacaagcattctaatatacaaatatgtataggttagccatattattgcatcttcccttgatttaatatttcccagaactatttccgcattcacactatcatctaatcttgacattaactgtgattcgattggtaattgttgattaagaattgctaaataatattgtaaatcagattgtttagttataatgataccttcaccatgagtgtcatatctaggtctaccggctcttcctaacatctgtaaaatatcttgtggtgaaagttgttcccatgtacctttttcaggagaatacacatcagtacctttaataataactgtgtgtgcaggtaaattgacaccccatgctaaagtggcagttgataccaatactcttaatagaccgtcagcaaacaaatcctcggataatgacctatcctctctggtcaatcctgcatgatgaataccaattccatattcaaacaattttcctaaagttggatctttaacgtttttactttcagataataaaatttctttggaaccagcttcttgcggtttcatcttattgatattatcagtttgtagaaatttatttttcaaccaagtagctgtgcgtacagtatcctttctagaatgaacaaaaataatcacttgattattattagataaagattcaaaaactttatcgtagcatgcatcattcatagctgccatcctttttaaggcactttgttcacgaataccacaaaattgttgggtcaacggacatggtctataagaagaatcaaaataaaagataaagtcatcagggactcttaaaaatttggcaacatcggtataatttggtaatgttgcagataatgcaattaatctaggaatgtttaaccaatatcgagaatataatgttctagaaacaatattttctaaaacaggacctctgatatcgtgaagaagatgtatttcatcaataattatcaaactaatgtcaaggacaaatgatgaatcgtccatctttctagttacaacatcccatttttctggagttgacaccagaatatgtgactgagcaatttcatacttatttaatcgagaatcacccgttaattctgataccttaatacctaaatatgacaaccttctttgaaattccctcacttgctcttggactaacgcttttaatggagcaatgtagactaccttaaaactagagaggttaaacttattggtgtaattattatgaaaatgagataatgcgcgtaaaatacctaaaatagccacattagttttcccaccaccagtaggagcacataacaaaagattagaatcattctcaaatactcgaggataaacttttgattgaatttgattaagagttacagtttccttagaggggaaagcttcttgggcccaatctggtaattctgatatagatattaatgaaaaattagcagatggtttctttggtgctggaatgtgaatttcatcataattgtctttaacttttttaaaggaaccctctgggagattaactttatcaatatttaaaatatttaaattctgattaaatttaattgcatcaagatctactatcggaggaagtatttgcttctttagcaatattttcttctgtccttgatgttgctcatttatttcattttcatcatctttttcttccaatgaccttttcattgacaaattattaccaacgtctttatttgaaagatactcctctaaaaggtcctgacaattattcaatttcattctttcaaatacattatttagatctgaaggtttcacttctgatagaattaccccccaagataatttatgataatttttagaaaagaatttaattaaattaggatgtttattatggtctaatatagtttcgattttttcaataaattgttttttatcatgttgagtagactttaacaatttaataattttattaaatatattgttaaggagtgttgattctctctgattaaaatctagttgtattcttcttttgatgtaatctttatttataagggtgattattggcagaatatttttctccatagttgactcaattataacttcctctttatttggtaataactttgtgtctaagatattttctttaattattgtagagttattgttattcacgatattcgataaatttgcttcttccccttcgccttctgcttcttctataagtaattcttgttctaaagtattcagatcctctatatcattctgattttcctcaacatcctcatcactaagtgaatttgtctttattatagtattatcatactgttttgaaatagtattatattttgtgtttaagtcataatcggtaatcatatttgtcagtttgattaaatctgtaaatctctttgtatcaatagatacacctaaatcattttcaatattttgttgtacttgtacgtttgtgtcgattttattaccatttttatttgattgatcttttaaattatatatcaagatatctgatgtttctaagataatatcgtgtgggatgtcatttcctagtaattccatagtccatttcagtattttttcatatatttcactattatagctatcacttgggtagtatttcaatgttgagacgttatccatttccaaaatagtcttatcgctaataatattagtggctgttttgttctggttatcattatggttgctcaaagaaatatctttattttgaatttgtcttttaatattatcaatttcttcagtgtctatttgcttattaacattttttcccatatcacttaatttaactttcccatacattgatgttggcttagacaattctgcatcattcaatggatctgattcaaaactctgtaatcttttatccacttgaagaactttatttgacatttcatcatgtctataaatttctttgatccttttttctctagaattcttatcattatttaatgcagacatagttaataattgatattagtaatactaaacaactggggaatagaatatgtagaaatagaatggaaaatacactcaacttggcttttacaattactctgttggtttgattggtatttctgggttttactactgaatattccaaaatttgttcaaataattcttattttgttttttttctttttgaatgtaatatcacattaactaactaaacccatgcaaaattatatgctattcatacactttagtaattgtgcaatgtatacaaagtggcgtttcaagttttgtttgtacactgtatggtctcttctctcttcaattacattgaaatattttttttaacagatctgaaaaatttattacaaatctgtaaatagatagatacccaaagaagtagaataacagaactgatgcaagtgaaaaagagattatatctttactattgtacgtgtcagaacaagaaacgattagtccgaattactaggattacagctgttcaattagttagtgcaatcagttcttaacttatatataatttgattagagtaggtgaagtctaaattagaaagtaatgcatttgaaggtaacattcaaataattaatggtttgttttatgtaagagaagtatttatttgatctctcatctgtcactcatcaaatctcttttgttgtctgcagttatataggaatagacatagtatgataaaaaatgagttctttatttagaagttcttccagttttctagaatctcaaactaaattatgggaatcagtacaatctactcaaaacgaacgtgaaaaatcacttcttaatagcaacactaagatggatagtgggagtaataatagttatcaaaaaacgattagtcaaaataagaatgtatatggttccaatatatatgataaagaaaatggtacatatgacaattctttacaatggtatgataaatattcaccaataattattgatgaggtctccgttcataaaaagaaaataaaggatgtagagcaagtactttcagatatgctttcaaattataatgaagatataagaattatgttgttaactgggccaagcggttgtggtaaaagcaccttgattaaaatattaagtgaaaaattggtacctttatatagatataaacatagaaatgaaaacctggatgttatcaacaacaatactaatgaaaacagtcgatttcgtcagaattatgttattgaatatgaaaattctctagaattaaatgaattgaatcatgttgaatcttttaatgattttttgcaaagatctaaatattttaatgggatatataatttgtctatattgttagtggaagatttgccgaatgtattccatttagaaacaaggttacaatttcaatctattattaaagattggttatcatctgttaataatcatagattaccaccactaataatatgtcttaccgaatgtgagatagcaaatgaaggtcataatattaatattactaatacatataatgcagagaccatattcagtagagaaatcttaaatcaccctaggttgaaaagaataaagtttaatccggttaataacactttaatgaaaaaattattaaatataattgctttgaacgaacagttaatgttaaaagaaaataataaatggggtttaaaagaccaatatattcaaactttattggaatcaaacaatggtgacataagatcaatgatatcatcatttcaattttgggcaacttcaaaaggtgacataaagactgttgataatagtgtatatataagaaatgaatcaatttccttctttcatagtattggtaagattatatatgggtctcatgataaagtgggaaatttgattgatgataatgaaatgataaacaaacttttgcataatagtagttatagtcacaatactattagtagcagtatcaataataataaaattcataacaataacagttccacatccttcaatgataattttaaattagggctattagaaaattacggttcttttaataaaggccaatttccaatagaagttgcttctgaaatagtaatgtctttaagtgaaaatgactctcttttctatggttcatgcagtctggaaggtttagaatatatgatacgcaaaataagaaatcaatttaacagctattctagaaatataaaatgtaaaccaaacggagggaatgacagagtacatggggattttatgttcccaagagattggaaatgttaccaaaaacaacaacaggttaaggtggaatctactgattatcaaaacgtgtcgttttataaatataatgaatctgtgttaatgaaagacattgttttgtatttaggatattattctccattgatacggaaacaatatgattatagaatgaaggcaatccaatattatttgaaaggatcaggtaaaattgacaagaataatgaaaataagaatggaataatatctaatatagagaatattgaggatgttgaggataagattgatcttttagaaagaataggtggtttgtttaaatttaattataattcttcaaaaaacattaaatcagaggaagatataaaacatgagatagagagaaatattaataacttacttcgaaaaagagacgaaaaactacaagtattgatacaaagatgggagcaaaaaaatatgtttgaaagtgatgcccataaaaatgatctttataatgaagattatcttgatgattcattagtagatagtgaacaagaagatttagagagtttgttggatgatgaggacgaaagtaaaatatatgaaattttgtcacaacagaagcctaagaaggggtgtgaacttttgggtgctgcaagtcattcagaatcaattaatgatgataatgaggaggatatgttgtcagattcggatttagaaaatttattctgatgcaaaaatcaaaagtaatgcataaataataactatggaatcgattaattaatcaaaattaatacatcttaataaattaattcttcacacattcattaagaaaataatggtaactgccaacttcatctatatatatatatatatatatacgtgaaatgaaataaactaaaacaataaaaaagtagatatagggttaagtaataaatcgaaaataaaatttaactatgtcatatttttttttgaaaatacattggatcttcatctaatttttctataataatatctaatccgccttgaaactctccattaagataaactagtgggaaagtgggccaatccgcaaatctttttaattcttccttaaaaaagggatttcttaagacgttaaaaaatccaaatctgatatgattttttcttaacaagtcaattaaatctcttgaatatctacatttaggttcatcaggtgtgccttttataaatatcataacaggcacactgttaactaatctttcgagtttttcatctagttcatttattaaagtatctgtatctgaatagtatttttgttgaaatagaatgttctatgataaaatagatagaacaataagattttagcagacactaaacgataaattgttgagtaataattgttgagaggtcaccaaaagttgttgagtttatttattaaatatcttactgttcgtagaggaaaatggctgaatgttaacatatataaagccaaggatttcatcatacattatttttatcttatttacaatctttctatattattatttctatgttgtatatagagaaagaaagtgaagaactttattataattttgtatactaaatctgtttaatataatattgagaatgtttactatatatccaatgaataaaggcgctcattcccaacaattttccatcatataaagtatcgttattaaaagtttgattacttctttgcagagttttgttttcttgtttcttaatttttattgacctattattaatatataggtcactatagattgtagaagtgcattcgtccagatttcgtaagaaatgtattagatctgatccataaaatttttgtaagatataaccatcccttgacaaaatgccatatggtacaaatgaaatattaaacatctccaaaatatctttattcagaggatattccatatttacaagaagaaaaataaatttgttaacccctgtatttgattctatgatgaaattgctaattgaatgagataatttattattttcattataaaaataaaggagtattaaaaaatttccttgtttttttttgcaaagaagatatagtttcaagtaaattttgtttactttgaatataaataattgtcatttggtctagaatgaatcttgaaaaattgcttcactgtacttcttgttctacttctgttttaacaaaaaaatagtagagtattaaaaacactgatattaatatgtagtttacattctatctaatagttatatatacaacaataagataaaatgggttgtcgcaggtcagaacaaagactaagtttagctaaaatatttaaatcaacgacaactagttccaaataaatattaaaataaatattattgaaataaaaaaatgtataatttaatagtatgtcaaaagaaataacaaaaaaaaaaagaggaaaaggttactaatagctcaattcttcatcggaagcattctatgtagaaaagtataaacctctatcttttgttatttctctgcaaacaaatgcacctttaaagaagtctaaaaatatacaagctgctttattgttagaataaaaaattattttttgacattagagaaatgatagctcattaaagaaaatttaggaacaaaagttacaagttagaaaataagatgcaatatataacaccaacgcagcataaaccgggttgaaagataatattcggtgattttccaatagctatagctatatggagttagggtttgtagaagaaatttgtgaaccttttaatttatatgaatttcatatatagtctaaactaaataaacggtatcatgacaactaaataacaatgactctattttagacatttcttccattatttttttttgtaacgagatgatagggttgttataaattttttagaaaaatatatacgcaggggcacagtttgttttataaaacattttgtgcaaaaacttctagtaagatattgcaaataatgacgtgatttccaaattctacatttactaattctttaattaagcacatgttgtattagaataataagccattttttttttatggatataacctttcacatccatttagcatttgtgacacccaaaaaaaaatcgggtgttataatgatttttagataagaaaattaccgtaaaaggaaaatgattaataatatactatatatataggtgaggtatgtgaatacacgggggtattaaggtgtgaattgttaataaagaatagaacaagatgaattatgttttatcattgctatcttcttggacattcggtgtttattctttccttgttgcaaatttataaaatgtattccaaactaaatttactatagaatttctagatagttcagggtgtcttttgattatttcatcaatataagtttcacatggatcggattcgttagttttctgtgggtctaatttccatgaactatatgcactaaaagtctttaagtagttttcatactgttgtaaagtgcaagtcttgcaaatttttaaaatattattattgttaaatatttgtttgttctttctaaaattccttgcattaaaatatgattccttgatattatcaaatttatttgggtctaatttaaagtcatttaacagattacgtaagatatttctaccgggttgctgccaatatggtcccaattgattatctgcatacgcaatatcaatagtaatatcatccaaatctggataatcaatcaaaatggcgtcaacatacccccaaatggcaagggttccaccaggtgctaatagatcatcgtatacaactttttgaaaagtatcaaagtcaaaccaatgaacacactgagctgcagtaattaaatcaaacttatatgagacgtagttcgattgatcgacattatcatatgaacaaacatcaaattttatgtctaggtttggattgatgtttgttgttacttgtcttttctgtaattcattattggctttttgaatcatcactgaagatatatcggtaccaagaaagtgtttgtatggtaagtccccgttttcatgtagcctttcatttaagtattgtgacagttgaaaagtggctgtgcctggtccgcaaccaatatccaatacactttgtccaattttcttattcaattgattgatttcatgataatttttcaatatttcataaaacgattcaggataatctggacgactaagaaaatatccaatagtgttgaacgatttatttgaaaaagcagacatgttaattgttatgaatggtactgttgttgtgaatttgaacccataaaaataaatgagaaaaaataaggtgaaccttatttatgctttactttctttctcactttcactcttgctatatatgtctatatatgtatatgtgcgtgtgtgtgtccaaaacattattctaagttttttacaatcattcattcttgatcatgtaactaaattttgaaaaggttagggtaagctgtcacgaaaaaaaggcacaatctatcgatataatattactagtcttattttaaattgtaagtatcttttctgagggcccggagttaaatgctaaacagtaaatcaaaaaaaaaaaaaaaaaaaaatagatcttcaaacaaaaaatatgtatatgtatgagaagctaacaattataaatagtaaggtttgattattacatttttgacactttccattttcaaaaccaagaattaagaagtaaccagggcaagataaaacataacaacttttatgttagatcaaataaggaaggttttttcataataaatagtttgtgttggtttgttttaaagtttataagaaataaaataggtaataaatatcaatagtagtattcaatttctattgggtattataatatgttaattaaaaaagtatttatttaaatttatcagttttagtacacatgtaacaacatatgttaagctcttcttatatcacttcaagtattaattttaaccttttcttactgatttttgtgtcttgtcgaggttcgaactgcagttgctttttttctgtattgttttcatattgaataattgaataatttaatatatgtcgaaaaaagaatacatcgaaaagcagatgcgagtatataacgacaaagaattgacatgtaacaaaacagcaagtttgcaacttgtaaataaaataatattagtcagtaaataacaatatatgcatatttattgactggtaaactgattgctagatagctaaataaatagatagattattaaaaaaaatagttttcagtggttaatcttcgagaaatataattattccattaaataccattattattgtttttgtttttgtttttgatctaagctaaatatattaaatggatgattcacaatttgaatgtaaaacgtgtcatgaaaagggttccgctgaccaattaatgaagcatttatctacaaccaggcataaaacggtcattgatatatctgatccacaaaaccctgaagaattatgctgtgaggaatgtaaggataacaataatgttcatcaattggaaattatcaggtttggcggcgatgatatggatatttattgtaagtcttgtctcagtaagttattgaacaatgaagacaaaattgatcaagatatgaaacaaaccatggtatcttattcattaaataatggtgctttgctttccttttggattaaattcaaaattttcagagattgttactgtttgaaatgtggggatgatgaattaaagatgaatgttaagaaaatgaatcaaatcaaaaatagtagtaagagtaaaaataacacgcttaatacacatccttcagtcttttgtgataattgtgtgaataaattacctaaaaatgaaagagattactttatatcggaagattcacataaattcatttatcatctattaaacattcctgaaccatccaataaattaaagaaactaaatagaaaaaggaaaagtttgcgtgggggtaaaagacgttcaaaaaataaacgtaacacaaagagtaagatctcttctaaaaaagtaccgaagccgatgactttaatgcagaagatgaccaaagaggcgttctctaataaaagagaaaattccaaaattattagtgcctctgatgtaaagttgagctcatttaaaggttttaaagcaattaattcagagagtaatttacaaagtttgactataaaaatagagtctatttctttaagtaatggtactaatactaatagtaataaagataatgacaataagaataaaactttatccttcgttttcaagaaaccggaaggaaataatatgacaaatggtgttgataaaattcaatctactcctaatttatctcgattagaaaaagaatctagtaaaaaagatgttagtactattagtttaaaaaatgattcaattactacaaaacagaacgataggaagaagcagaaaaataaaacaagcgagaaaaataccataaagaaacaatttcagacagcatccaattctaaacaaacaaagttgaacaagtcatctaacaaaaagaataaaaacatgcaaaaagttgccttaaaaagtaacaataacaaattacgatccgttaaggagaaagctaagaccaattttccaaatgataataataccatacaatcaaatagaggaaatagtataatgagtagaaaagaaagtaaaagtcaagttgcatctacatcatggtcaaatggatggagcaataatttaattggaacagtggttgaattaaataacaacacgagtgaatctggggaagaaggaaatttaaggaataagaaaaataatgaacaaacattccaatccaaaacatggtcaactggctgggatgattcattcaagggtgccgaggtatcttcgcatttggaagttaaagaggcctttacaaaaaaggtgatgaagaaagaagataaaaagaagaagaaagaggacgagaataacaattatcatgccgtagagaataaaagcactgaatcacaatacagtggaaatagtattgaagaaggtactcatttaagagcgtatgaaaaattcaagcccgttttagcatacccggatatgaaaacttattgtgatacattttcttatgctctttttcaagaagaaagactagaatcttcttttatgaaagatattaagatcatgtggcctttagacaaaaaggaaagtgtttttgtttttaaaacgtccacaaataatccagaattacaatatgtcctagctccccatttgttgaaagcaggtcgtattccatttaaccagatgcaaccgttaatgctagtcaataaatatgatgacactcaagtatggtattgttttattaaagaagtggctaaagtacgtaaagagtatcatgttttagtagaattatttccatggaataaattagtgttacctacaactttaggtagtgatgatttaatgatacttcctacctcggtacaaacaaatagaattttattttctatgactagattaactaatcctaaatttattcagttattattgggtaatgaaaagattaaacagattaagtttaataataggttaaaatttagtagagatacattgaatgaatctcaaaaggatgctgttgaaactgtattgaataatagtgtcacagtaatacaaggtcctcctggtactggtaagacatccactattgaggaaattattgttcagctgatagagaacttacatacatatcctattctttgtgtggcagcctctaatattgcaattgataacattgcagaaaaattgatggaatctaaaccagatataaagattctaaggattttatcagatcgaaaagaatcagaatatgcaatggaccatccattgggatcagtatgtttacataatttgattatgcgggatttaccagatgatgttagaaataattatttagcaaaacaaagaggtgagattcttagtgcgaacgcagacaggaaactgtatgaaaatgtcactaaatatatcacagctcatgtatgccgcgctcaagttatcttaactacaaacatgaccgctggaggacgtcaattgaaagtcattaaagaattaccagtggtaattatggatgaatctacacaatcatcagaagtctctaccttagtgcctttatctctgccagggattaagaaatttgtgtttgttggtgatgacaagcaattatcaagtttcagtaatgtattacaattagagatgtcactttttgaaagaattcttaaaaatggatcgtatgaggaaccaaaaatgttgaacacgcagtaccgtatgcatccacaagtcagtgaattcccaattgctcatatctatgacaacaaattacaaaatggtgtcaccaagacagacaagagttgggatggtattaagtatccattatattttattagttgtaggaaaggatcagagaccaaagttacaaatgactctatgaataggggtgataacgttgttagtaacagttttcgtttgcaaggttacacatatatcaatacatatgaatgtgacattattattagtgtaatttataaactattggacgagaaacatgtttcgctagaggatattggtgttgtcacaccatactctgcacaaagagattatatatcgtctcgtcttgttgaagatatggtcattaatccgaagggtttggctatggtgcaagagatagaagaagacaaatttagcgaaaagaaggacaatggtctactaagcactattaatggaattcaatctcatacggttaatattattaatgggttacaagtggctaccgttgattcatatcaaggacatgaaaagaattttatcattttctcatgtgttagaagtaacaaggagaataaaataggttttttaatggacaaacgtcgtttaaatgtggcactgacaagaagcaagtatggattgattctcgttggaaacgactctgtgttagagcgcggaggtggtatgtggcgaacatatatacgttatctacgtgggcgtaagttgatctttccttcattagatcagtattgaaagtgtatttataaatgtttctgtgtacgtgtgtgcatgtgtgtattcataatacatgactgctaatgataaattttccaagtgttttctatctacaatatacaatacaactcttcatggggttttctaggcttacaatttagttaccctccctttgtttatcatgttgaacgatgcgtatgatgagtgatttatctatagtgtctgttagtattgttttatttttctttttggatcaaagacggtggtgtgatgtgtggtgtgtgaagtggaaaaggggagggggacgggaggggcaaaaggagaaggccgagaaatagagaaagaagggtgagtgtctcttagtttctttgtttgatccaagttcaaacgttattactctaagaacactttgcgtactttgtatactttgataaggttttttttatggtaatctgttttatcataattggcacgattagtcttaccaattcaacctttaagtattagataaaatattatctgattcatttgttgttacttttggttctctctctctcttttttcttttcgtttggtatttttttttgttctttttacatttcactttaaggtagaaaagatcagatctagatagattcacttttgtggaatagttttggaactttaactattacttgttattaaacagaacgataaaataaaatatagaacacgtgtgatcatcaagagctaataatcatcacaagatcctgagaatatacatatatacacacatacatacataaaagaaaagtaaagaaatgtctctaagtcgtgaagattccatatatttagctaagttgaccgaacaggccgaacgttatgaagaaatggtcgaaaatatgaagaacgttgcctctgcaggtcaagaattatctgttgaagaaagaaatttactgtctgttgcttataagaacgttattggtggtcgtcgtgcttcatggagaatcgtttcatctattgaacaaaaggaagaatcaaaggaaaactcacaacatcaagttgagttaattaaaaactatcgttctaagattgaagctgaattaacgaatatctcgaatgatgttttatctgtgttggataagtatctgattccaacagctagcaccggagaatccaaagtgttttattataagatgaaaggtgactactaccgttatctagctgaattttcccaggaccaagcgagagtcgatgctgctgaatcatctttacaggcttacactactgccaccgaaattgccaccactgaattgccacccactcatccaattagattaggtttggctcttaatttctctgtcttctattatgaaattcaaaattcaccagataaggcatgtcatttggccaaacaagcctttgatgatgctattgctgaattggacacattatccgaagaatcttataaggacagtactttaatcatgcaattgctcagagacaatctaaccttatggacttctgacatgactgaaggtcctatctctaacgaatcacaacaacagcaacaagatcaacaacaggttggtgatgatgataacgatgatgaaggtatccctccaaaataaggtaagaaaaaataaaataaaataacgtaaagaattttttttttggagaactaatgtttatgaattaggatgagaaaaaaaataataataataacattactgaaagtacaaaagaataaacaagaaaataaaggatttttttttaaaaaaaaaacgtacataaggatgattcaaagatatgaaaaatcggaacgggaataataaataaaattggtttaattgattttgatttcctttattaatcttttttttttgtatcctgcaagagtgttcttgaaaaatgttatgattattatcgttgctactactattattatcattacttttaatttaattttattttattatgtcttttaattttttttttatttttgatattactttgttattttaataattattgatgactatttctttttttttatttataccttcttataaaaaaaaattaattattctgttttatttttttttattatactattttatgttactatactatactttactctgttttattttaacctattttatcaacatatatatatgaatgttagactgcgctattttttgtgtctttttacacaatttacattttatggcagtatagacttttattgcttcagcttttttctttttcagttttatttgcttactatatctgcgaatttagtagaagaatcatctacatataatatatatgatttaaaaatatgcaatcattacgatttttatatttttcttggaagttttcatagctttcggatatttgtatataaaaaaaataggagggggggagcaaatgagaggtgtcagatctgcatatacatatacatataaatatgacgggtgtgtacacatacattataggtatataggtaggtatgtttgttcagctatagacttggtttgtatgaaatattggagatgagggaggggaggggggaataaaaagaaaaacataacagcgtcagttttttctttttttttttccttttttttttcttttttgttttgccctgtttttttattttccccctccattgtcattttgtccctgctctgtgtaactttcaaattttgtcttgttcttttcatttttttgattttttgtttttgtttttttatcaaattctcttttgttccttgtttttgtttattcttccaggttatgaataactgacttcttggaattggacactttcacatataggggtaaaaaaaaattgacttaagtatatgaaaagtaggaagttgtaggaggtcttgtgtttatatggttgttattgatgataacacttgtgtgtatatattatagataaatcttgctctatagttgtatcaatcgagtatagacaagctgaacccagataaatagacaagttagttttttttttcatttattttgtgtctgtctgcgtctgcgtgtctgttattcattatgttatctactatttcgcgtttacaagctcctaaatcattaataggtaggtcgattgtgtctggtaccattacttctacctccacttccactatccaaaattctctattgtcagtgacaaaaaggagaacatactcaacagataaaactaaagatcaatcaataccaaatactgaaaacgatgtcgtcacaattgaattaccagaaaaatcattcgaaggttatttggttgacattccatcattaacctatcaaaccagtaaatcttcacttctacaaatgtataaagatatggttattatcagaagaatggaaatggcatgtgatgccctatataaagctaaaaagattagagggttctgccatttatctgtgggccaagaagctattgctgttggtgtggaaaatgctatcacaaaattggattcggttatcacttcctacagatgtcatggtttcacctatatgagaggggcatctgtaaagagtgtccttgcagaattgatgggtagaagagagggtgtgtccttcggtaaaggtggatctatgcatctttacgcaccaggcttttatggtggtaacggtattgtcggtgcacaagtcccattaggtactggtttagcttttgcccatcaatacaagaatgaggacgcatgttctttcactttatatggggatggtgcttctaaccaaggacaagtctttgaatcgttcaatatggctaaattgtttaatttgcctgttgtctattgttgtgaaaataataaatatgggatgggtactgccgcttctagatcttctgctatgaccgaatactacaaacgtggtcaatatattcccggtattaaagtcaatgggatggatgtgcttgctgtctaccaagcttctaaatttgcaaaggattggtgtgtatccggtaaaggtccattgttattggagttcgagacttatcgttacggtggtcattccatgtctgacccaggtaccacctatagaacaagagaagagatccaaaacatgagatctaagaatgacccaattgcaggtttgaagatgcatttgactgaattgggtattgctactgagagtgaagttaaagcttacgataaagctgctagaaagtatgttgatgaacaagttgctttggctgataaagctgccccacctgaacctaaattgtccatcttatttgaggatgtttatgttaaaggaactgagattccaactttaagaggcagaattcaagaagatacttgggattttgaaaagaatgattttgctaagacctactaaaattaaaacaacatgaaaaataacgagtaaaaattcttttctatttgtgtctttttttgttttgttttgttttttttcttgcttattgttgatattataataaaacaaacaaggaaatgaaaatattcatattattagtatacttgtaattgtcgttatcttcttttcttatttattctttgttgatcacttttttaatttgaatgttatatatctcaaataattatgtgcagatatttacttattcctttaaagcttctatatctattcaaggtaaatataatacatatatatttgtttatatgtattacaggccattacatttatttatatggatgatagtacagtttaccaaaatgaaaagtgtgtatccacggaagaaagtccttttcgatccgtttgctcttccgcggagttcaactaaaaaaaatgatgttttatctatatgtctatatacctcataggctggtgatttagaacccttaatttacaatcaatatgttctttcctattgagttattttagccgctcaagtcttataatgtaaaccgtatatatatatatatatatatatatataataatgtattttttttttcttttatcaacaactacctatttctgaactgtttgtaccattgtaatcattaagtatatcactacctccaaccccaaggatcagacctttcttgttttatttattttattttttttttgctttttaattcaatgacagaagaagctaaacaaactgtcatatcagttgatgaattacaaaactatggcataaacgtatcagatatacagaaattaaagtcaggtggcatcttcacgattaataccgttctttccacaaccagacgccatctgtgcaaaattaaaggtctttcagaagtaaaggtagagaagatcaaggaatccgcaagtaaaattataactattggatttataccggctactctacagatggatattagaaaaaaaatattttctttatcaactgggtctaaaaatttggattcaatactaggtggtggcattatgaccatgagtataactgaagtgtttggtgagtttagatgtggtaagacacagatgtcgcataccttatgtgttacaacacaattacccaaagagatgggtggcggtgaagggaaagtggcttatattgacacagaaggtacttttagaccagaaagaataaaacagattgctgaaaaatatgatttggatccagaaacctgtttagaaaacgtgacttatgcaagagcacttaacagcgaacatcaaatggaattagtcgagcaattaggtagtgaattgagttctggtgattatagattaataatagttgattcaataatggccaattttagagtagattattgtggtagaggtgaattaaatgaaagacaacaaaaattaaatcagcatttatcaaaactgaatcgtcttgcagaagaatttaatgttgctgtttttatgacaaatcaagtccaatctgatcctggtgcttctgcactttttgcatctgccgatggtagaaaaccggtcggtggtcatgttctggcacatgcatcagccacgagaatcttattgagaaagggtcgtggtgatgaacgagtagctaaattacaagattctccagatatgcctgagaaggaatgtgtttatattatcacccaaagtggtatctctgattctacagattaatagaggaactttgttttttgtttttttgtttttttatatttagttggctaacttaacactctagttggggataaagaggttctgggcatttttcataattttaagggaacaaaaatgagaaaaaaaaaaaagagaagaatttacagtaataatacaataaatagtaaaacgtttttaataattacaaacatatctatttttaatggttttacttaaggatagacaaaatcaaacaaacaaataaataaatgtactttttaaattattttcttaaaaaatttgaataatttaaaccaaaccttcagaatgatttatgtcattcaactcatctcttatttcactactactgtaatcaattaatatttcgttatcctcgttaaacttattactttcaacataactttcatcttcatttttattatcattgtcatattcaatttcataacctggaaatacaagaggcttcattaatgaaagaaatggaaaatcataaaattgatctctctgtttagataattggaaaaaattaaatttatctttaccaaataaataatacatcattttatccatattagatattaatttcgataattcttgatattctagttcttgtggaaacattaacatcttatctcctattgaattagaaataatagaattgattacaccaccttgatctaattgattttcgtagttacaaacatatctaaatggactacaatcaaattgattctgtccgaaactattcgatgattcatgtagcatggataaatcaattataaatgaattattacttgaaaatattctttcttgactttcttcctccacaatatacgacagttcttgtatatgaccatcgtcaatattacttaatgatggattcatttcattaaacacttcaacattagatgtatttaagcaatttgaaaagcaagaatgctgtcctattcttgataatgattcatccattaacagagaattaaattcatctaatccatgaacataaagatcatataattcatcattttcatcgatgaattggatattagaattagatttttgtttatcagaataatccttcaatcgtggtttccccttatatataggtttgagagttttgattatgggtgtttttagatttaaattaaccgtttgcataatatgttaaacaatttgtgcttattcacttgtgatattttctgttttacttattaactataatgagatattaatacaataaaaaggagagcgaattcaaaaagttgaaaacaaacaattggttactaattgtccagaatcactctaaatgcttaattgtctatgcattctctatattttttgtttgtgtttcattgaattcgaatttatgacacacaatccttattgggagatcaactaagtacaaaagaaaagaaaagaaaaaaaaaagaaaagaaaacaaaaataaattcaagccttgaaagtagcaaaaaaaatgtcgacatcaaaaaagtccttccattcttttgttgatatcttgagaatcgacatatggaactgtggaaaagcacaaaattaaagtaaggacagataaccggccatcaatttccgagcagtatcatgatctaattacttctctaatacattactagaactcattaaattattaatataatcttgcagatgctcattttcacgttgtaaatcatcacaaatcttatgttgttccaaacttttattccaaagtaagtctaatgtgtctctaagtaatttggtttcctttaataacttttcatcttgttttatatttttagaagattttgtagtttctatagatgataaggtcgtatcggatttggattcctttaataagttgttatcggtattattatcaatagtgttattgttctccatttattataaatactgtaacaaaaagaaaaaggtaaaaaaagaaggaagttagaaagtatttgaactgaattattgaataccttgtttttacaactataatatggtaatgaaaaagtacctttatttactttaagccctacttgatctaaccataagacttttttatagatatgatatttcttatcttcactctagagatgaaaggataaattgaaatttttaagagcttttttttctataaaaaaaaaaaataaagtaggtaatgtcaaaacaaaaaaaaaaactgtgcatattctacaaaatataacagttgtttaaatatagttccacaacgtcttcccaaaaatatgcatatattcaattaattgtgcaaatttccatatttattaaaatgaaatatctatataaatttgtatttatcaaaactaaaaaaggaataacagtagcaataatattatttaagagatcgaaatgttatataatgtaaaacctctttctcttttcttgtatttcgttcaatataattatttctttgaattatttctttcaattttcttgtttatattagcttcattcaactttaatagatgaatagatctttctaataaaaaacatattactaataaaaccaactgaaccagtgactagacaacacaatagagaaatcaatgcagaataaccaacatataaaactatagtgataaacccacctaacttaaatttagtaaacaaaatggaatgaatgaaaacatagactgcacaacccacaccaccaacaataaaacttctccattgccatttccaattctccaatgataaagaatggtaagtgattaagattgtcactagacatgtagttaaagttaacaataaaaaggagaagaacaaaaatccaaacatgtagaaaatcttattaaaccacaaactagtgtaaatgaaatataattcaactgcaatggatccgaatgggaaaataccagcgaaaaatgtggctgggatcgttttcaaataccatggttggaatggaatttgtcttgcaatttggtttgtctttgttgggtgctcattccaattacatttcttataagcaattaaagaacctgctatagcagatgggaaggaacagataaaccaaatcaaaaccataaaaaatagggtacttgccgggattgtacctgaagaatgagcccataacaaaaagatattcaatgcaataatacataagaaaataaaacctggaactaatattggagtcaaaattaaattagccttccaataaggaccaccaaaaaatttataaacacccattgatgtataagatccgacaaatccaaataatgcatataacatgaacatgacagtggctaaagaacctcttgagcttggtgaaaggaaacctaaagcagcaaagaaaatactaactataatcattaagaataactgcaaaccggaaccaacaaaaatagataacaacattgatctagttggaatacggaatacatcaccatgaactaatttccaaccagaatcttcttggaaatcattatctagattcaagtcattataacgagcaaaatcattttttaaagcctttaataacatgtgaataacaacagcagataaaaggcatacaactatggaaaaattaattaaagaaaaccattgaatagttggatcataagtatgaagatatttatcccatctagtagcccaaacagtatcagattctacaaagttaacggaatatgtgaaataaacttcgttgtcctcatcttcacttaacactaatggatcgccttcagtttcacaagtacctggagatgaacgtttaatggaaacaggtgtgacagtgacaccaacaacacgtaaattaccttcaccacgatcatgatattcaattgtgatatcatgatggttaacaaaatatggaatctctatatttttcatcattttaacattttttggatcacggacatttaattgaacatttcttttttcagtagaaaggccttgaacaatgttaacgtatcctaattcaaaacctgtaccataatagtcggaatcagtagttgggtcatgaacaagtcttgcagctggtaacccatcaattaaccagttttggaaaaatccatttttaatcaatttattaataaattttgcatcatcctttggaataacggttttacaaagtggagaacaagtctgttcttccaacattttaattttgtaaggagaattgtatattctgtctccaaatataactgaacccaatgaagatggttgtttttcaattttttccggtttacagaaatggaatttatcatagtaataatcatatgaataaagatattgttctttaccaatctttttaccttcctcattttcatgttgccaataaacagatggtgatagatgattaactaataatggaatatcatcaccttggtgataggtggttggtgcgacaccaggtaaataaaaagcatttacaagcgatagtagaagtcctaagatgataggataaagtgttagcattctttttttatgatttttctttttttatctgacctctaatgttattttagtttgtaatattccaaaaagtacttatgacctatattttcttttaatgcaattattctgttgagttgtagaaaacagtaatgaaggtatggataactatgtgtttacttgcaggtaaatagaagggtgtttttagtaaaaaaaaaacaatacaaaaaatataattacttatgtatttataatgataacatctaagcaagggtttcgatccttctttctttcttttcaaaagcagtttttacttttcttaagaaaaagaaaacagtctgtaagaacttatccaaatataatgaaatagagtcagaagaaaatgttttggcttccttatctttactgcagtctatccacgtcaatttgttcattgatcgattttcttacttttgatgtttctttgccatgaaaaaagaaaaaaaataaataaacaaaatggctcgaggaagtaaaagaattttctaaaagaaaaaaaaaaaaaaagcaaaaaaaaaaaagaaacgatacaaattttaactagatacattctcactattatcgtcataagaagtcataaagagagtcaaacagggaacaagagcaaacttatataaccttaccgcatgaccaagtgtctgcagttggttgtaaaccatttatattactactgggactagtgctgatattttttcgtagattgtctttatatttcattacgttatttgcaatatataagatatagtatttttaggtatcataacaaaatatgtaaatgcagaatgaataaataagtaaaattttatatcgatttacatcaaattcaaaatcttttctggaggcaatgtattgaccatttcattttcatcaataacaggattaaacacttgagaattaccgcttgtgctatctttaaaaacatatgcaagcaatatgccaacaagtccaactatagatacagtcgccaaagataatgccaatccaatcaacacaataagcccactatgtatctttttttgtttacctttagctaattttctagtaggagtactggccgatgttgtaggtttggttccaatggtactggtggattgactactttgattcacaatggaatcgggtaattgggtttgtaatattgaaaatgatgaagtgtccttgttaacaaataattcaagtttattaagaatatctgttttactattattgattgtcgataaatacagatatggaacccatcgattgttccaataaatcatactttgaaatgacccataattgggatcataaaactgtcctagtattaataaaccgtcctttttttgttcgtttccaacacttattggttcaattgaatatataatattgccttgacctatatttggaatagatatagatgataatgtttcattcgctattgtgtgtatatgggtatcattccacgctattacggaattactagcattagagtttataataaaatcgttaattgtgttcttttcagtgataagataatttaaattattgctggttatattaatggttaataattgattgatatcagatgaattggcgcctaataatataatagtatcttgattgaaaaaacttagttttttgatttgcatactctttaatgaatttgatagaaaaggtgaccatttttcatttttgtaattataaaaacacaaattcgaacaattattgttattcaattgaaaagcacctccaattagcaaagtattattttgtgggaatcctaaaattgaattaatctcggtatattgacccaaatccaaattttgaatagtagtgagattagttaaatcaattatagagaaagttgtatttttgttaggtgaatctgattgtgttgcaatgacaaataaagtattattattttcgtataatgtagctgagactaaatttggccattttaaagagttgttcattccattattcaagtaaatgtatgatgtatcatcattgttgtaaaaatatcctgtcaatgattcattgaaatagattgctttgtaaggtacaatattatcaggtagattaagtggcacaacctgtctatttaatccgttaatttctataggactatcaatggaagaataatcgactactgaaatttgaccaaaaaacaaggtatcgttcacatcattttgaccactactttgtaaagtaatattgaaattttgctgagaagaatctaatatttgagaagatgtcatattataaataatattatcattgaagattaataattcggtatcaaataaggttacattagagacagagttaatattagtttcatttaaaactgataaacttttcaacgtcccattataaataaatatttcatttgaattttctgtaagtaaaacaataccttgattaaatggatgatgagttgtaattttttgagaaacatttagttgtgatacttgattaatattataattctcgttaagttccaatacataaatttgattctctaagttgctgataattagagtagaattaccatataaagtagcagtaatgtcattttcttttccattggagattttggaaccaaatttatttaaatctgttaaacctataggatttactatattattattcgtaaaatttgaaggctgatattggaaaacaccattcaattctactgtttcattattagaaaaagtatcgtttaaagatactatgttaacatctaccctatctgcaaccactacagtcattgtatttgaggaatataacccggaaacatattttaatgtaacttgacatggattattcaattgtccatgataaatagtatcatatttgtattgttcattattttggtaaattaaatttgtcgacaaaatttcatcggtagtcttatcaattacagttacattgacaatccctcttgcaaaacatgtaccatctgctgaacagcctggtgtaatgatatttatatcatatataccttcattttgaatattgacattaaattgaacttcaggtatagcagaatctgaatttggaatatatctggtaactagataggtatctgtatttgttttattggttatccaatcatttggtgataatgatgaagagacaacttgatagcttgtatcagaatcacagctttgtttattccatgtatcattagcaaacaccgtatatgtgttttgaaataactcaattcctttaaggctaacatattcatttccaaatgatgccaaagtcaatatttcaagagttgacacagatacaggattaacgaatgcgaattcttgaaatgttaatgaccattgtatgctagttgtattattattaattagtttagatttgatagtttgattttttgcttgaccctgtaacgttgaaattgaatagagggggcaaaatgcagtacatgtagataattctccagatatagggtcaagatatgtcatattcataatactggatgctggataagtcaatattctaaataatgatacggcggtattatcgttatcgctattatatattcttatctttgttggaatcgcagaaaatcggagttggccagtcaatagattcgagacaccatctgcaaaccagccattagatgtggatgaagaatccttgggacatataagggtacttgtggaaatgttaccagatgttgtgttccaggttgaatatgctaaacttatctttggattaaatgggtaggattgatttgttgtattggagttggataaataggtactattatctaaagtagtaaatttccctgtgaatagaatgttatcattatttaacataattatagaatttatatgtgaattagaaccgaatccaagaaacggtaaggttgcattactttgggaagtaaaattccattgaataacactattggccttatcattattatcgttgttgttgttgttagagaaactaaaattcccaccaaaatatatcattttattgtaatcatcacatacaatggtagttactgaatttaatggttgatcaaataattgtgtgattgacaaatcagacagattatagaggagttggttagctaaattattattattaacaaatgtcccatacccattgaatatgaaactgtcatcttgaaagggaataatattagtaaaagatgaattttgcttattattattggtattatctggtaattgaataaaagtattatttgaagcatatatcaaatgattaccagaatgagacatactattattattattatttatatctactttagtaaaattttgctgtccattatattgtataaatgtaaggtcctgtatttgattcaatatttcaaaattatcatcctgagatcctaaggaaatagaatatgacggtatctgtgatatatttaataactgacttatttctgataaatgtgattgatcgaagctatcatatcccattacatatctggatgaaacaatccataactgtagtaagttggaaaacttcataatgtattatgtaactggtatatcaaagaatagtaatgcagaaatagtaagtaagaaaacttatctgtttccttttttttttttgttttattttatttcaattgatgacaaggtgtagaaagtcgttagcagttgtttttgtctctataaaaaacaaatgggaccaattttttctctaaaattctgtatatctatgcacatacatatatatatatatgtatgtatgtatgtatatttaaatgtaaatttcaaatgatatatatttgactaataacccttatatcagtagtttaattacttcctctgtttaattgcattgtacatatttctttttttttctgtgagttgtttgaggttttattttttttttaattcattcattttatcttgaaaaattattttgtttttttttttttcattttctggctgctcaagccgttctccacgaaaaatttcccagacttaccaaattgggaaggagtgtcaataaaagcgaaaaaattaaaagaaggtctgatatgaaaaaaagtagtgctagtgaagaagaagaagaagcagaagatgatgatgatgataaagattgttccattattgagcaactcttaaatccaattttggtagccaaacctattttttgtacaccactctattccatgttcccaatactcttcgcgtgtgattcttacagatttatatgcatctgttgttgcaaactccgacattgcataccaattgctcaattcattgtctttcttatttgttataattctacaattccaatctgtgggcaattgtctctgtaattcgtttgttagtcttgacacaaagtgtggaatattgaaattcccacctgtgcaaactatattgcctaccattaaaggttgtaacagctcaggtaacatagatatactctccagtatggtctctacaagacctggcttcagtagtttagccatttctggatggaaaaatgtctctggtatcataaatctttcatctactaatgtaatagtttgggcatttgatggtaattttgaactatcacccgggtcttgagggtcatggatatatccaaggaaacttgtatggaaatctggtaacacatactgtaatgatttatccattctattcttaaaactatcgaaatacgatagaggactcataaacaaacatttttctttaatgttgttaaccagtatagtctcatccatcatattgtaatggcgaaatgacaatgtttcttttaagaatccgtttagaaatctaccacctatatcaagttttttcactgccttataatacgggattcctttaattattggacacacccacgtacaattataccctgaatctacaactaattgaaaatcacgatattctttcctattcttggaatcgtccaatgacataatattgctgtttgtttgttctattttacctttatcaaatattatagtattattgttgtctgtatcattatcatcactaccactattattattattattatttaatgatgcaaatggaatgtatgccatagatggcgctttatagagactaacaaattcatattcttcaaatataacttgatccatatttttacttagttcgggtatggtcagacaagtttcattggtgactaaatgtgtgtctctaatagaattacccaagtggaagccatcaaattcatctgggttatatagacagtagtcccagagacaactttgtaattcccatgaagttaattgtcctagcttatgtggcctatgtaatgtgactgctgatatatccttgatatttttaatttgattgccaagatataatgcatcgtatttatccttgcccaatgtatttaatgatctaaatggtctggaagaattggcaaatccaaatttaatctcataggatccgttatctattactaatggaatttctgacatattcaatctttcctctcttcaagtgattacacttaaacttatactcattcatagatacttgtttatgaatagatacatacaagggtggcctccatatatcaaattcctgctgttttttcgtctttgtctctgtttctctctctgtatgtgtgttttgtttgttttaaagtcttttcgccatttgccagaagacaaattttagagatatttcttaaaagggaaacctctctaaagtttcaagaacatcttctctaagataaacaaaaccaaaaaaaaaatattggtttgatttgttgtagcagctttctgttctgtgtttaatggtaatgttggtggtcttggagcagtttttagtattgctgatttgatttactcatttataatttaattgtttatttcaaattgtgcttttacaacgtataatttacgtttatgaacaaacttctaatcatttaaataaagataaaataagactaactgtgatcgattataccaagaataacaccaggcatatcgaaagtttgcttttattcaattttttgaagacgttgtttataataatattctaatgcaggtagatcaagaacccaaaaataagaaactaaagactttggtatcaacacctacacccaataaagaacaatccaatcccaattccatatctccacgtaaaggtaaggatacgactgggaataatgattctaaaactaatgacaatgtatttattattacgtctcccatagatcataccactatgcaaacacctcaaatggccaaagtgcttgatactgaagctgcatctgctacacagccaaggaagttggtgttggggtctccagaacatcgatttgctttttcccaacctgttaaaatgccaagtaccgaggtaaaattgccaagtggacaagttcctaacctaagagaagattccctcccacctttaacacaaacagatggtttggaagaaagaggcaggcgtagtacaatgaaagtatacactcaatcaccaccaaaatccccaaataggtctccaacaagaactttagaattgattaaattgtcaccaacaaagaagtcaagattagagttgcaaagactatatgatgctcaaagagcaaaaacatccaaaaaagaaagattattcatccatcaattggtcttaaataattttaaatcttatgctgggagtcaagtggttggtccttttgatccttctttctctgctgtggtaggccctaatggttctgggaaatcaaatgttattgattcaatgttatttgtctttggatttagagctaacaaaatgagacaagataggttgtctgatttaattcacaagtctgaacaatttccaaatcttaattcgtgttctgtggaagtttatttccgttatgccgtagataaggaaggtaaaaatactgaaatcgtacctgataaagaattgatagttgaaagaaaagcattcaagaataattcttcaaaatatttcattgatagaagagagagtaattatacagaagttacaaaaaggttgagagaagaagggatagatttagatcataaaagattcttgatcttacagggggaagttgaaaatattgcccagatgaaacctaaagcagagaaggagagtgatgatgggttattagaatatctagaagatataattggtactgcaaaatacaaacctttaattgaagaaaatacaattaaaattgaacaactgaacgatgtttgtattgaaaaaaaaaataggtttgattttgttgccaaagaaaaagaatcattggaatcagataaagataaagctcttgaattcatagagaaggaaaaacaattggttattgaaaaggccacaatgactcaatatgaattatatcaaaatgatcaaaaaattcattcaaccttaacgaaacttaatgaatttaatcatgatataaataaaagaaaattagaaaataatgccttattggattctaaaacaactattgcaaatgaactcgaagcattaaaacataaattagatgacttaaaaaatgaaattaaaaagttgactaatcaaaatagagaatttaacacaataaaagtatcaaatgaagaaattttgaaaaatataactaagaaaaaagagatgataaaaaatgctattgaaaaatcacagttcagtgttcaagagactgaaaataaattggcagatttagagcatttacaaaatgaatatgataaggaattagttcagttacaaaatactataatcagcgaaaaagctattttaaatgacattaaattatctttgaaagataaaactgaaagtattagcaaaaagataaataaattagagaaagatctggaaccatggaatgctgaaattcagaaaaagaaatcagacattaaattaactgaaatggatattactcttattaacgaaagtaaaacaaaatttgaaaatcatataaattcaataaaagaatcaattgagaaattaaaagtatcgttgagtgaaaaagataatacaataattatgttagataagcaacataaaaagatcttacaggatataaaaattggcaaggaggaatgtttaaatgctaaaaaaaaattgtatgaaatgggtaaaataattaatacacaacgtcaacaagcccaagaaacaagatcaactttattaaatgtggaaaataggaataaaatattaattgaattgacaaaattacaacaatccggaaaaatatcaggatttcatggccggttaggagatttaggtgtcatagatgataaatatgataccgctgtatctactgcatgtcctcgtcttaatgatctagtggttgaaacagtcgaatgtggtcaatactgtttggattttattaaaaaaaacaaattaggatttactcgttttatccttttagataaaattaaccataatatcaaaaaaatttccactcctgaaaatactccaagattgtttgatttaataacaccaaaggaatctaaatttgctgctgcatttttcaatgtgatgggaaatactctcgttgctaatgacttaaagcaagctaatagggttgcatacggtaaaaaacgtttcagagtagtaactttggatggtaaattgatagatatttcaggtgctataactggtggaggtaatgttgttgcatcaagtttgttgcaattgaaatcaaaaaaatcaaaccatgaaccaatttttacagaatttgaagtttcaaaaatggaagaaagcttgaaggaaaaggaaaaaagttatgatattgccaaagaaacgttccaagaaatggaattagaattaagtaaattagaagagaaggagccacaattggagatagatattgccaaattaaaaatagatgttgagtctattagatctgatattgattcaaaggaaacggaattacaaaaaaaattgaaggagaaggatagtatgcaaaacgataaaggacagctagataagttacatgcaaaggtaaagagtttaaatgatgaaattgagaatattatggaacgatgcaagagcactaatgaaaaagttagtgagttaaaaaatgaaataatgaaaatcggtggttctaaattacaaatgcaaaattcaaaggtggactcgattttagaacgtatcaatatattagaagaaaaaaaaaaaaaggaaagaagtaatctaaaaaaattggcatctgtactgaaaagacataagagaacgtatgagacatcgattgtcgagttggaaaaatatgaaaaagattccaaagaggcgcatattttaatagataatgcaacaggtaaattacaagaaatagatgattcacttaatgctctgaagtctcaaaaggatgatttaaattctgagatagataataaatctcaacagttgcaagaattggaaaagaatttaaatgattttaaattatatgagcttgaaatgtctaataagactgagaaattaaatactctactcaaagcattacaaaaaacagtcacaaagctaacaaatgaattatcaggatataaattgagagacgtatctgcgatcctgaagttgttagaaagcgatgcccaagataagtctatatcaatagtagataataaaacagaaactaataaacacgattcctctgttgttgcagaatcatttagtgagagtgacgatatgagtgaaaatgatgttaactcgatgaataataacttgaattcagataaaatggatgttgatcatgaggataaagaaatatcaagaggaataccttcactatcagaggaaactttggaaaaattagatgtttctctgcaacatcaaaaaattgaagaattacaaacatatgttgacaccacaaatgttaatgttgaagttcttgaagagtatgcaagacgaactttggagtataataacagagagaaagatttaaatgaggctattcaacgtagagaagatatttcagtaaagttagaagatttaaaaaaggaaagatttggtaagttcatggaaggctttggtattatttcaatgactttgaaagaaatgtatcaaatgatcactatgggtggtaatgctgaattagaattggtagacagtcttgatcctttttcagaaggtgtcacttttagtgttatgccaccaaaaaaaagttggagaaatattacaaatctttctggtggcgagaaaacattaagttcgcttgcattagtgtttgcattgcataaatataagccaacgcctttatatgttatggacgaaattgatgcagcattagacttcaggaatgtctcaattgtcgcaaattatattaccgaacgaacaaaaaatgcccaatttgttgttatatcgttgaggaataatatgtttgaacttgctaagaatttagttgggatatataaatatgaaaatatgtcaaaaagtgctaccatgaaaaataatggggcacatgctaattaattttttctaagaaatcgaatacatctttatagtgcgtttatagatatcggcaattatatacttatataagttagtcattatgcaaacttcccacttgcagtataatgcttactcagaatgaccaatgatactagcatattctttttcagcgctatgtataagcttttggattggtaccataactaattgatgagtaaacattggaaagtgttttctattaagcccgaaccactcaagaggaggagttgcatcacctaaatcttttatctgtggcatatcaatacgaggttcttcaattgcaatgtagataagttttagtaaattctcttcttctttgattctcttttctatgttatcttcactttcttcgttaaaatttcctatattttgagagcgacgtacggctaaggctctcacatgcgtagcccacattgctttgataaaattgattggtcctagattccatctcactgcaattttatcaccaaatgtacttgtatatttgtattccaaaatatcgctattatgggattgccacgtatgcatgctaacttgtaatcttgggatatcaataatggtaccacccttaatctccgaagcatatttcatataatcttcaactgacatacgcgaaaccgtttcttcatcaatttcttttttcgaggtagataacgatcccttagcatttaatatctgtaaatctagatatgtcgccactttcccaccagaaagtgtctttacacttgcaagtatactttcgatcttaataactacaacctcaatattgaataatgaaattggtgatatttgcacattaaatgttttaatatctacggatacatcagtttgtattaaatttaatacccttagtacatctctataatttatctttttcttaagttctgctgtatcagattctcttaatgtttctaaatatgatatattggtgtcttgcttcattctcattatagtattataaatatcaagtaaattggaagcaaccaaagctgttgaacacaaattaatggcattacatgtcagtgttacaatcaaaagatcaggcatattaccaagcctgtctctttcactgtgtaaatgtattttggtattatcaatagtaccaattaggaatatatgataatcaaaagcaagtttgattttgatattgtcaatattgaaggatattgctactagtggatgtttagaatttcttgttatactgctccaatttacctccgcaacccaaaaggctccagtaacctcaaaaataccactcaatcttcctattgattcaagttttactacatctgtaaaaatatgcaataattgtcttttattttcataatgatcggatgcaagccatattttcttcaaatttaatgaaagaatacctaatgaaggacctaaatctattctccctcttatattagagaatattaaagtaaagcaccatggaattaagctcccgccgtgatttacttgttgtaatgataacatagagccagttggggttgttacatccggtatattcaatggttttgaacgtagcatttcaccaaattgccaaatatctagaaataaatatagattttgtatttgtttaacatttaaatatgcatctaaatcagatataaaaccggttgcatacatgttaacaatattaggtttagtaaacaagaaaattaaatctattaaatccaaattaaacgatgcactggtttcacgtgagaaaatatgcttaatggatgcttggattttttgtaaaataaatgaaaaacccaaaggctcagagctgtccaagttgttagtgtttatagagaagttaagaaagtcaaaaccaatatcagcctgtacttttgccttgggttcacagcttaagcttaatttttgtttagaggactgtatttcaaaaaatatatcaaatgcccctaataatttcttgtaatcaatggtttgtgacgaagattttaaaggctgaactttgggtgttagtttgcctttagaactatgacgccttaccatattttgaatatctgttgaaaaattattaagtaatggtgcacatttcgaaaataaaatattatgagtgggttcaattttaattaaagtccttatccaatgaggttttatattctgctcatctattttatagtcaatattaacggtaacacccggacttttaaattccaaagaaggttcaagatttgatttggcatcatctgctgagtatattttaaacacacccccatcgtattttacttggcagttgatttttctaatgttagatagaaatggcgcaatatcctttacacttgatttatttttttcatcattattcacactttcattaacatgactgtttaacggatggactaataatctgttcagatcttgaaacacctgtattgattgtaatgtagactcaataacattaataaatgtatttaagaagttaacatccaatgattccccatgaagacggataaatatatcttttagtttgccaacattcttaacccagtagaggatttgaagatttggaagaaagcttctattaaatgtacttttttcagttccatcagaataaaaattatctgatgtattaccattcgctactgcaaaaaacgcatctactaccgtaagtttaccacaattattttcaaatgcagaaaatagcctattataaccaatgataagaccaggattggtttcgtggttgtttttatgaaacaaccaaccaatacaaaaattgtatgataatatgtggcatgaacttaattttaataaactcaaaagtgaacttgaactattatcatttgaatggatatctgttgaagatagaaaatcccataaatttttcggatgatgtgtagtatagtgttgatataataccatcaactggttaccaccccagagtaaacggacaagtagatatggcgacaggcatattctaaaatggggactttcgatttgatatgactgttgagtttcaagaggtttttggatggttgataacttcaaagataggtctaccatttttgaaagagatgatggtatacctctatctttgataagaattagtatgttttctatagataaatgtccagaaagttcttttgaattattaccagcttcatttaatcctgtatccgataaagacattaatagctgatggatttccataacaaaaaaagttgtcgaaatggggattaaaataccataatattgtacatttgtatctagagaccattggatcctagcagtaggttttgtttcattagcagatgatgatttggaagtaggagcaaatagtgtcttcaatgctaggagtttttttaaacttgaggaagctacacgctcatcttgaagaaaactaatcaataacctatgaggttcggacaatgttaacttaactacagaagcaactatttcagcatttataacaatatttggagtcagactacttgatccttttagattaacattccccagagataaacgaagatattgttgttttgttaaatgtgagcccaaatacaaatcagactcttgaatagttatctcaaaattttgcattctttggaaattgaaggagacttccaatcttttggtttcctgtctgtattgaaatggtgaaagaggcattagttcaacactaatattagaaaatatgcatgtgatatctgcatttatcaaagaaactgtcttttccgttcttgtatttgccttattatgtttttttgtaaaatgaaagttttccttcacgtcatccactttattttttaaatctttgataaattgaattactgtgtcagtttctggcatgattcgaatatgtatatcattgtattgtatgtttgttaaaatattgggtttataattcagagattcagccacaaatataacagataaatttgtaatttgagtttctaataacaatttatgattgtgttgtagtgatagttcagacctacctgcatataaaatggcagaaccaccttgtcttactgattccttaggagtttctagaagtgcacttattttacctgatgatattagcaaggaaagttcagttttaccaaaaacaaaaagaagatcacaggattcaaaaatagcagcaatattaactttaaaagattttcgtattgtattaatacgttttaaagcaggctcttcctcttcttttaataaggcaattaaactttcaattttgaacattttatcgcttacctttcccttgatctttcccaaattagctgtgatgtttataactttttctctagtaattcctgaaactgtgaatggtggtgttttttcaattataaaatttgaatttgttatgataaaattatggtcaacaccctgtcctgcagtgtagatggtgacataaagagatgtcatgtctagtcttgtgaacatttgcattgcctttttttgcttctctgactgatttactaaaaataatttaccatatatatatgaacgtgcaatatctgagaactcccagtttctccaggttgaaaaaacagacatgaaaatatttttagcatcttgagatacatcaaactttcttttttgtagatgtttggtaacagcactattccagttttcaggaagatatgtaataatatgacgcaatctagtgataattttccaacttctattctcacgaacatgacctcttgagagtcttgtaataaatgctggttttgttatcacataaggatcgtgactaatttgataataatcaccagcagccgtcactcttgaaataacctcttttcgagatgcagaacgctttttttgtacatcttcaaaagttgtaatggctttttcaatatattctttctgaacaccaaaaaatgtaaataaccagactatttgagtttcatctattgttatatccattgatgcaacgttaatagagtttagttgtttttctttcatggttgaccaaaaatttagatcttcaatcataaatgacaatgctggcggaagttcttcttctatacctccatcatatttagaattaatcgttgctctaattgatttcatttttaacaatacagcgacttctgctagaattttttcacgatctttctctatggacttttcattcatttcaaaatcaatagaattaagatataattcaaggccaccagattgccttttaccccaaaataaatctaaagataaaattctaaattttatattattaattgttgatataccctcttgtattttactcaaagttttgacgataccaatttcaatactatccataatttgttccatgtcatcattataaaaatcaaccaggaaactctcaaggaagcttaatgtcttagggtcaacaacaatggaaacataatttgtgtcaataacataattattacagttacaattctcctcatctgtttgaaaaaatatggaagattccaatttatcaaggtctttatgaggtagcttatctttaagttcgtttttagtaaaatatttattaaaaattgatttatgagtttcataatactcttcatttccgaaaaagtttgatacaacatattttattgtttgttcaactataggtattggaagtggtggaagagaagatgatggtacaatcgacccttgtaacgttttgtatatatgagagttttgcttatcttcaggcaacaaaaatgggcaacgacgaaatggtgcatcatttttggtaatataatcgatttgtatctctctatggtggttaagattgcaagatttacaaaagttggaaaagtttacttgtgtttcaaattcaaagtatgatatttcgtttttattttcatctgccccgactaatgaaatgtgtatgtttggtatcctcatatcaaatcttgtcgaatactttttattctcaaagtcaattcttccaaaattaaatccatctatttttatggataattttgttttggattcaggttcacgtacggcaattagaatttgttttatgtttatagttagagaagtcatatcatctacgacgtctgcttcatataataagacattttctaaatcactaaaaccaaagccaatcttttgaaaagatgttataaagcctttcaaaaaattaattcctgaattaataataaattctcctaaatcgaaatcccatttacaaaaataggtaggctcggatggtggcaatccgtacattctgtgaccatgaatagttatattagaaagataaccctcttgtttaatattgtttccgttattatctcttacaatatcaaaaatattatgtgcttgttttgctatatatcgtctaaagtaaatgtcctctatggatgtgagaagatccatgtagtaattagagcttctaacatcaatcattaactcactgaaatgacaagcaattacagggtcgcaattatagatagtctctggtaatattaaagctccatcaaaaacagaaaaagttagccaaagatcagtttcatttgtagttctcttcatgtcattagcagttaacgtttggctcgtatctttaatagatattgaagatttagtactgaaggaattgttacttttactatcttcctgaagatttgatatctcatttgaagattttatattaatttcacctgtgtattcttcagttgtaacaaaatgaaaaaaatcaccaaaataattcatttttacatttatcagatatctaataacaaagccataacaataaagcaaagtatttttactggtacattctatagtaaccatatcaacattatccacatctaagtcattatatattaaataattttccttggctttaaaacaatatgatctgcccacttctttttgtttcataaattcgtttaaagtattccatgggggtgcatttaataacagtctgaacattggagtttttatacaataaattatatttgaagatctctgaccaagactatcagtagaggtagaaatatctatgtaaatattatcaccatgaaaggaaagataacaattttcattaaaatctaatgggttgttaacaatattgtgatcattgacatttaggtagatggaatatccatcaatcttccagttaatgatgtaagtaaatggtcggaatagctcatatggagtaggttcaccggaactgaagtctgacaaaatgtctgcaattagcgtaatatgttctcttagaataaaagtttctaactgtgatgataaaacgtctatggttgttatcgccttgtcgttccatcctaatggatataataaagaaatatcaaatgttaaagcctttgctttcatgaatatatcatggttgacactagttcgaatttcagtttgttcaaatagaatattgattatattactggatcctgattttgttgcacaaagatcgatacttatcaaagcagatgagttttgagaaaattttaagtctaaccaaccaaaggatctataatcatcatttgtttctttataatgttttaaaaattccgcatctttactagattctctcgtaggtattctccacgttatttcttccatcacattaaatgatattttgaattgtgtatacacccttttatcacctggttttaaaattggggtagggttttgtgaccgagataaaactggactaaatagagttttaatatattcaatctgcctttgtgcccagggaccataacaaattgaaccgccatataactctatatcaagttcaagggcgggtggtgaaccactattaccaatatctggacctttatttttatcaatggttggatgtgcaccatgaggaacagaaccaggtatgtcgaaactatacgtaaagataattctgggacatttgacgatatttgtaaatttagcatattcatgtgcagcaaaattaaattcaatgtcatctatatcattattatccatagcaaacatattttccctatatatcaataagcctttccatttttcttgaaatgctgcatttgaatctaacggttttttgttgtatcccttcttatttaaaggtgttaacatattaccggaaattttaatgaattttctccaaacttttgatattctacctttgtctattttaaatttaaatgtgtcatctttattatatccaatgttttgtctcagtgacatattaaaatttttacaatctaaagtaaatttatttttgtataaatctaatttagaatgggcttgagaataatccaatataccttttgcgttatcagcacttaagaccattaaagatggtgtaaatttattaccgataactactgcagtatgattaacttttacttcaaaagggaatgattgtaatagaatatcgtttttagattcttgttcctgaaatattctatcattaattggtgaattatttgaggtagatgattcacttgaatatgattctgtttcttcagaagatgtagtcccatgattgaatttgttgtttgagtcactactattagaagaatcacttgaagaatatggtttgttggaattcttatttgatttactgttatttatatcattgtgattgctgctgttcttgaaaactttctcatttaaatattgttcaaattttagtctttcatccttaggtaaatcattcaaaatattgtcaaaagctatcgttttattataaataaaaatttctaaaccctcacattccaaaacaaatctacatggtaatgtttcgttttgcttcaatatattatcttctatattatatttttggattaattcttcaataaattgaggatttctagttctataaagccaatatctccatgttattgtaccttctaaaaaagatatggtataatctttatcaataatagttaaattcttaaaaaatattctccctcccaggaaacttattctaaatgactgaaaatttatttttattttggcatgtttccacagaatccattccaatagaaaactgaggagatatgctaatgatctacctagataaaaggttacgctggatatcagaatgactgtgagaatccagtttactagaaatacccaactaaaattcctcccattatttaaagctttggtatagaaattagatacatcatccatctgcttgttttccttatttattatatgattccttctagttttattatgtaatgctgttaatttataaaatgcactttaaaaatagtttatttgtttagtgtgatatatatattgaaaaataactgtgagataaaatgtctatgcaaatatgtaaatagatgaacagaaataattaatccaaatgatatgctatattaatgattaaatagaaaactttgcaggtgtaccaattctcaatttttttgaaaatacaatgacgtttgttgctttgatatttaaaggataaagttttgtaccttatgtgttattatattttgcttatgctattttgagtgttgattactctaacattagagaatgaggtgaattgtttccggttagtctgttttcttcctttttcttcttcttcttggatcttccattttttagcaaaatggaatttttctttaattatccaagttaaacctagaacaaccttaaagaaaaggccagacgaagcaaacgggtatatttatgctggacttctatatgaataaaaaggacaaagaatgttttaatcccttagcaaagttgtgattcatacatttatttgactctatttggttgtgttctatatttactaagatactcctctcatattgagaaaaattgtacaataataaacggtggctatcactaatagtggcactaattacattttattttggattgcgagcgctttagttcatgattattttcattaatgaagcgaatgatcacattcgtattgtacttatagttgtatgtaattgtatataaaaagtagcttatttgcagtaactttgatattcaaaccgttgtataatcatatgaaaaaattgatgagatgaaataaaaatagtacaacatttcaaattgttctttatatcaattgaaagtaaaaatttgggaagcttagtaataaacacaatattatttttttttattctacttatctctggttatcaatattttctttcatcttgattagtcacgatatttctcaaagaattctttgtggaacttttcccaacgttcgatccactctgttccaggggccaaaaatgttgttcttaaatgataagtacctggaacttgaccaaacccagaacctggaacagtacaaataccagtattttccaataattctttacaatagaattcatcaggagacatttcttcatgtaaagctttttggacagccttgtatggtaaaagtagttgtgggaacaaatacatggcaccttgtggtttttggcattcaatgccttctaatttttggaaagtttcccataatttagtagatctcttatgtaactcatcatgaattaatttacgttcggcacggtctttagaataggattcatcacctggttgtggtggggacaccattaagtcaaccaaagcttggccagtaacaacaggacataaggaaatggaagccagtttcaaaatgacttgtctaacttcatgtgtgaaaccgactaattccatgtaaccacctctttgaccacattcaccagaaacacctttcgatgtagagtgtaaggaggctaactgtacatcatcaaatagacctggatattctctttgtaattctcttagcacttttttcattgaatggaactcggcatcatcaccaaaaatgttttcttggtatacttcatctgcaatgactacaataccatatttagcagcaatctcaaagatctccccaatggcttcctttgaaaggacagcacctgtcggattacctggattgataaccacaaggacggatggtttaatacttttttttatggaatcaagaacaatattttcaatttcttttgtattagtagaccaaccagacttttcatcaaggtaataaggtaaggcatgtgagttatttaaagccaaagaggcagtatataaaggatactgtggaattggaattaggacaccagtttcttcacctttacaaaagattgataataagtatgatacagcagaagaggcaccagcagttaaaaagatatcttccgggtaagctaattcaccgttatctcttttagtaatgaaatcagcaacagttttccttataccataaacaccttgagaagcggaatatgcaccaacggaaccaccaacatcctttaagatacgtttagttcttttaatagcatctggttgataaatagaggcagatttggggttatccatagcttcaggatattgtaaaagggataaaacttgtctgtaaaaacttaatggcttttgatttaattgctgtggattaccaatattagcattaataatagactcaaatggtaacgattgacgatctttatccaattgcatttgtaatttttcagctctcattggaatagcacctctgacagcatatttagcctttttaacattttcattaatatcagaaagtgttaattgtggagcaggtacaaagtcaaactttttgttattttccaattcatttaaacgaggacgtttaattgtgcgcggaattgaactagaagtagcaatagaagcagaagatttgcttaaatttggtaaagttgaaaactttctagattcttttctagaagtcgaatagagatcaattgaacatgtacttaataggacagatggagtcatttgggttttgtttactattttagaagtagagaattttcttgtagaattcaataaagtgatatagtagtcacttgacgagacacttgaaaatctaagggtcgaagccagcatttgtttcggttatgttagatagttcagaaattaatagcaaagtaaataatcaactgaaagttcttctttctaataatgtttgtatatgtaacaaaacaaagtaaaattgtatgaaggaagattttttgatatcttatgtgttatttgttaaaaaagaaaaaaaaaaaagaagaaagaaagagtgattttaatttatagtcacgcaaaatagaaatcacagtaggaaaaacaaagaaaaaagaagtataattatgagaaaattttcttaaagaattaacagattaattgaacaaatcacttgaggaaggagaaaaaaaaataaaatgtagaaagattatgactaatttaatcttttttttgttagcagagaagaataatacgaatactgttgagtcacttcttttgtgttggctctcttatagcatatatgtctatcttttgatagatacaatgtaattccaaagttgaattggttgatggatacagtagagatatacttcagttgtataagtatgtgtatttgtatatgttatatttcacaccacacaactatatataattaattgactctagcaaatgtagaagtggactatatcctaaatttctgcgatggttgtccatttaggttgtatataagcgttagcggatgactattattatcatcttgctatctgcacaagaaaaagcctttatatacgtctaagaaatcctttaaggtgatcttgagtcgtgtgaataatagtaaaaaaaaatatcaacaaattgtcgatgattcaaattatcatcactattatttattatttgctacacattatatagtcttctaaataataacaacaataataatagataatccctcttattcatattagaatactatttcactttaatgtccgacaatattattttttttttttattttaaacacgcacattaaaatgcgaacggatattaaaatgcgtagctaagtgttagcacgtgatttttcttcgttcaagaaaaattttttttgtctttttttttcattaatagggttgttaatggggggttttttatggaaataaaaatattaccatgtttcttgctttttttttagggttggtttatattgagcttgatatgtagactttaagttaaataatgttagtaaagacataagcgaaccctacacagccgacaaagtgacctaaagaatgtgtggttggatatatatggatataggcgtgagtttacctaaggtaataaaacatataataaactcaatacatagattcctttgagattaatgtgaattagtttagagactagaaaggaagtcatttaactaaagaattttgtgttagttttactgtatttttttgtttatttatttatttgataatctatgagtactaagaaatctccatacgagattcttgggttagagagagatgccacagaacaagaaattaggaaagcttataaacaattggcactaaaatatcatcccgataaagttatcgatccagatataaagattgaaaatgaggtgaaattcaaagaaattacagtggcttatgaactcttgattagtggagagtatcagagcgatgatgatatcccaaatgaatataatgatgatttttttgatttttttggtggattcaattattcctataataacaatcatcattcacatcgtagccatggtcagaattatagtgaaaatcaaagagaacaaaatgagcaagctatccctcttttactaactttgaaagaattgtataatgggaaaactataaaatatcaattacgaagagatgtgttgtgtactctatgtcaaggtaatggttggaaaagaaaaaaaaatggtgctttgtatagcccacctgttataagatgttctaaatgtaaagggcaaggttacatggaacgtgttataaatgagggcttcttccaatatgtacaaaaaataaaatgtcaaaaatgccaaggtaaaggcgaatatgaggcaagacctaataatgataagaataaatgtagacaatgtaatggcaaagggttacatgcagaaacctcggttttaactattgatgtttttagaggaatgaagtttggtgacaagatttcgataaagaaatctggtgattatgatttaagtacaaatgtgatcaaggatttaatattcgaaattaaggaaaaggaaatgaagcagaatgaaatgaaaaatataaattttaataaagctggagatcgagattgtatgatggaggttactgttccgctgagtgatgcattaattggaattaaaaataaatttttaactagaacattcgatgatagattactatatttaaatgtaccattgggtaaagtgattagaccaggtgatattttaaaggtgtctggagaaggttggccatataaagttaacggtcagataaaatttggtgatctttatattaaatgcaatattgaatttccaccagataattggtttacagaaaagaatgatctatttgcaatacacaaccttttgccacatagtacagtaaaggaagaaaatgaaataaaggatccaatgaatagtgaatttatttcaaattttgatattgtgacatcattcccagatgagcataaagaaaataaaacatttgataaaacgacattttccaataaacaaagtcaatgttgtatccaatagatggatcttgtgtagatatatctgtggtttaatacgcttgtaaatataatggtattgtatacttaattttagcatggtttggaacttctgttgtttaatctttagatgttttttcaaaatgtatacaattatagaaagttctgtgcaagatttactataacatggcatgagtttctctgttgttatgtcattagtcttgtattatactaaaagttactacttaatatcagtattaacttgtatttgattaaaatgactgatattttacaataaaattaattgctatatgatttgtatgttatttgacactatttcttgaagtttcatctgtgtgattacattttggacggattccaattaaaatgttaatgtaatcatgaaaaagtttccaaaaattaaacaattcataaattgttagaaaaatttatacagtaattccaaaagaaaaataaattttagattagtaatatgttaaatatgtttgagatgtaagcttattctgtaacctctatatcaaaaataatcaataattgtataaaattattgtatcacagtatggcatttttaaaaaaaaaaaatctactcttgtgactttttaaattttattataacttcgacatgtgctcttattaacaaaaacacttaagatgttgctgagactagtgaccataacagtttggtaataattattaatactgctgaaaaaaaatttctaaagcataaagatgaagcagtaaaaatttattcaatctccaatgatcattgtgttattacgggaattatcattttaataataatgtttttaatgaagtctttctttttttttaaaatgggaaattcattattaaatttataattatataagtgttgtatcgatataaagataagaaatttagaaaaagatattttttattctttaaaatattttttatattataacataaaaaaagattaatatatttagacctcaattccaccaatttccaataattaccatttctcaaaccttattattatagccgatactcaacaaaaaatataataaagtggtgaattgtgaaatcaaaattaacgctatagggttcataatgatttgtaccattttaatattgcatacttgacaagaatcaaatcaaaactcattgataaaaaactacataaagaactaatgttgggaaatgttattttctattcttgtattattatttaattttatacaaattcatataagacaaaacaacatatagcaatatagtaatgataagtttactaatagtattaaagtacccatattgataccttttgtcatatatattgttgagaatgagcgcctttattcattggatatatagtaaacattctcaatattatattaaacagatttagtatacaaaattataataaagttcttcactttctttctctatatacaacatagaaataataatatacaaagattgtaaataagataaaaataatgtatgatgaaatccttggctttatatatgttaacattaagccattttcctctacgaacagtaagatatttaataaacaaactcaacaacttttggtgacctctcaacaattattactcaacaatttatcgtttagtgtctactaaaatcttattgttctatctattttattatagaacattctatttcaacatatattaagtaatatattactagaaattattgtagatttatatcaaataaattattggatgattcttcatcagcataaaacaatagttttctataattacatactttataaaaattatatattctgttgcataatgttgtaatatgatgtagtcagagttttagtattattcggggaagcgctcgaaatatcaaacagataatctattaataatcgagacaataattgatacaatcggtaatgtaattattaatacggtcttatatattaacggctatatcgagcttatataattatactattcgcttattgtattctgcgttcgatgttcgttggttcttacgttcaatatataatatatataaattatgtataagaaaggagtgacaaaagatagttccatctacagaaaatgttgtccttttatatgttttctggaactcgatcaactattcaacttgatatattaatgaattagtaacccatatctttattattagttacaataatataatcgaagatcatagaacatttagaacaataggttattgtaacgcagtaacagagatgtgtgaacacactgtacgctaggtaacaaatggacacgttgtacttaaaacacaataaatcactttagattcaagtggaatcttacgtaatcttggtgatgttatctctttattatacaatagacgatgttatagtttggacttaagaccaatttttttaacagtactattgaacgaatagtaagggcaataacaaatatataagaacgttatatatatctaggagggttaagggtttattgcttgtttttctttttttttattatgtttatatacaacatatagattatttacgaaaaaattgttatggaagatgatcttttatctccagaaaacgttgtccttttatatgttttctggagctcgatcaattattcagatttgtatattaacgagcttagtgatccaaaccctaaattttattacattaatctaggtgcactagtggattagaactgcaccccaattctttaatcatgataattgttattattctattctacaacagatgatgttgtagtatggtgtggtgaagttctttgtgtattccagggaagcgcaaataatattaatagtaattcaaataatcgagacagtaatcaactatagtcgatagtataattactaaaacggtcttatatattaagcggcttatatcgagctaatgtacttattcgaagttacttgatttgttacttgcttgttctattttgtttatacataatatataaattatttacaagaaacgattatggaagatgatcttttatctcctgaaaacgttgtccttttatatgttttctggagctcgatcgattattcagattactacattaatgacttgactgattcaaaccctaaaatttattatattaatttaggtgcactactggattagaactgcatcccaattctctaatcatggtgattagtaatacacgtgggacttaataaaacaataggtaaattctagatttgccaagatcttatgtaatccaatctttttattatgcagcatctaatgttgtagcacatgtatggcttattaatacactaattggttctagattcattcaggatcttatgtaatcttgatggttataactattctattccacaacatcttcctctctctcttgggaaccttgtttccataattgtacgaaattgtcaattaaagattgaccaatatttgttgggagtaagttaaattcttctactggatattctactgtaatagtcggatcaacatcttccatatgacaataaaacactttgttatctttatcgtaaccgactacattaataatttcatgtactcttaatttcctttcggcagcagtattaggcggatcttttggatagcggtcttttctacgttttaacggttttagtttttcaacattaataactctgtgagtctttttcatcgaaggtaaatctaattcgtaagcattgtcatttattttcttaactaccttaaatgggccaacgtatatgggttgtagctttagatattgacctctcttaaaataagcatcacgatgtagcagtacaaaatcaccaatttcaaaggtaacttccttcctccctttgttatgtgtaacttccatgttgatctgattctcagttaagaaatcttttgtgcgtaaagtaagtgctttcaactttgtggctagttcttgtgttgaatcatgacgggaagaaacagcatctcctgtaactatgattggttcattagggatgtatccaatatctacttcaaaaggagctgtcttggttacgcgattgggagtagagttatagacgaattcgatgtgaggaagtaaacgatcccattgtctatgattgttaccagtataagtctttaataacctattaaggatctgtattgtacgttcagtttgaccatctgtttgtgggtgatttgctgtggacattttcaattttatattcaacctttttgccatttcttggtattctgtagaggtaaaacgagggtctctatctgaagtaatggaatatggaaatccatggtaagcgaaaatataacggaataaagcattaataacggaagtagtatcaaatgggtaactaccagcaattaagtgagttctttttgaaaacatgtcgactacaaccataatcatgtcgttaccttgttctgatttaggtaaaccagatacaaaatctatgctaatatttaaccatcgaccttcgggaacttcagaaggcatcaataagccctgtctattagggcgatgagatttaatcaactggcattgtatacaggaagagacatattcattaacagagtggtgtaattttggccaataataacgacttgcaattttattgtatgtaacggttgaaccgaaatgaccaccataaaggccatggtcgtgatatattcgaaggacttcatttcgtttagcgtcgggaacaacatagcgttctttaaagtaaataatattgtcattaattgtaaaacaatggcgaaaggttcttgataagttcaatttcttcatatatttcttgaacaatgatgagttgcaaatgggtaagtcttttgtatcaagtttggtaatataaacaaaacaggcagcacataatgggtcagctaggtattcttcgtaccaatttttcggatctaatgtgacggcagcatcttcaatagcagcaatattgtaatctgctctggaaatagcatcagctactacattctttggacctgctaagtattctagtttaaaatcatattcggctaattcatttaaccatttaattactctacgagagggttctttgttcttttgtgccgttagtaaactaatatggtctgttctcaatataaaatgcatgccatgaagcatatatttaaaatgtgataaggcttcgacaatggctaggagttcaagatctccagcagagtaatttttttgagcgccttgtaaagtttttgaaaaataacccacgaccccgagaatttttccttgctcattcacttcttcgagtacagcacctaatccattctttgaagcgtcggttgttaatctgtaatgaccatcgtgtttaaaggagactaatattgggtttgagattaggtgtgactttaatgtgttaaagctctcatcttgatccgtcgaccacttacttttaccatgtatgtaatcctgaatcggttgttggatgtgagagcagcggggtataaagcgtctataatagtttatcatacccaaaaatctttgagcttctttaattgttctgggagtgggaaattgttctatagctgcacatttcgagatcaacggttggattttattagcagagatagtgtatcccaaaattcaacagatttagcggcaaagttacattttttcttttttacaattaatccttcttgagttaacctttgcaatacgatgtctatatgtttccaatgttcatcaacggaacgggagtgaattaaaatatcgtcgaggtaaacacagacatatggtaagtccctaaataaatcagccatataacgagcaaacgtgcttggagcattaacgagaccaaacggcatgacggtatattcatactttccattaggagtaacgaaagcggttttgaaacgatcgtccattttcataggtatttggtgataccctgagtggaggtccaaagttgaaaaaatggttgaagagccaatcttggccaataggttgtcgattctaggtaatggaaacgggtctttgattgtcacagtatttagagctctgtagtccacacataaacgatatgtaccatctttctttttaactagaaccactggtgaactacagggtgatttggagggtacaatgaatttcttttcgagaaggtcggcaacgatcaggtttatctcttgttctatttttggtgtcgtctgatatggctgtcttctaggcaggcgtgcacccggcttaatttcgatctcgtgttcaacctttggaggttcagcgaatttcttaggtggtaaatcatcgcggaccgtagcagaatatttctcttttaaccagcgaggtagtttatcaaatcgatcatctgtatctgtttcagaaatctttatagcaaacacagcagcagcattttcagcatctaattcttcggtatcattctcggtaagtacggatacaatgtattcagggaccggtttcttgttatttaatatcttgtggagcagcgggtgagatgatataatcgggtgtcctattatgatttcaaaagtaatagcatcagttatgtatacgggtgttttaatttttatgtcatcgagttcaagtaaaatttcggtggattcgttagtgtatgacgattcggatgatacaacacctctaaaacggaatggcggagcggtagaacgtgttaacttgaggttgtcagcaatatcggctctaataaatgatgtgggggaaccagtatccactaaaacattgacaggtttttctttaataaacattttaatttggcaactgttgcctacgagtggatggggagcggacacgatgggagctagtgtgacggtgttgttgtggaattgtttttcatttgggactgctcgccttacggttagggcagtcactgtagcggtgtaatggcttgtaacaatagaaacataaaccatgatcaatacaatattgacgagagggacgcttaattggttgtttgtttgcttgggaagatttgtgatttccctttctgccccctcttccgtgtgaacgataaacagcagcaacttgaggatgatgatcagtagtagagtccatagggactgggttaagagcagcggtcatatggatgtctccatccatatcataggtggtgaaggtaggaaatgaacggttggtgatggaaactgtttcactggcagcttccatagcagcatcaacagtggtagggcgagctagagctaccatacgggcagtatcaggagtaagaccgcgataataaaaaagtaattctcccttgggagtccaaatgtttggaggcatcaaagctaatagttgtgaaaacttttgattataagcgtcaatgccaacggtagcttccttcaagcgttggaacgcattgaggatggcatgagggtcgatcataccaataaacttatttttaaaatccacaaggaattgttcataggaatgttggtcatgattacggatccattggacataccattgagcagcgggtccagttaagtttcggccaaaaaaagctatacgatccacatctgtttggaggtttcgagcataaagttgtgcttcgacagtaacaaggaaatctggtagtttaaataaatcatagcgaccagagaagcgcattggagcagtactgtagtatttggaatcggatgggactggagcaggagcagaagtagggtcagcggttaggttagtagttggagcaggagtagtggttggtgcggtggtatgatgttctgtagccgtagatgcatcaatagcgtctaaaaattcgttcatatttaaattattcgaggacatgatgaaataaacgctaccagttgttgtagtatggtgtggtgaagttctttgtgtattccagggaagcgcaaataatattaatagtaattcaaataatcgagacagtaatcaactatagtcgatagtataattactaaaacggtcttatatattaagcggcttatatcgagctaatgtacttattcgaagttacttgatttgttacttgcttgttctattttgtttatacataatatataaattatttacaagaaacgattatggaagatgatcttttatctcctgaaaacgttgtccttttatatgttttctggagctcgatcgattattcagattactacattaatgacttgactgattcaaaccctaaaatttattatattaatttaggtgcactactggattagaactgcatcccaattctctaatcatggtgattagtaatacacgtgggacttaataaaacaataggtaaattctagatttaccaagatcttatgtaatccaatctttttattatgcagcatctaatgttgtagcacatgtatggcttattaatacactaattggttctagattcattcaggatcttatgtaatcttgatggttataactattctattccacaacagatgacagctagacaaggttgtatagtgtagtggttatcactttcggttttgatccgaacaactccggttcgaatccggatacgaccttttttgctttctatttttaatgatttatagaaggctaaaacaacaaaaaaataaatgtttaaaaacatcttaaatattgggatctgctagattttagtaacttttatcacaagaatacttaatgatttcaggaccttttaatcaactatggttaagaattgcgagtaattccaatcatcgacaaaggtcgatgtattttgcgagttagatgctattgtagtaataactagaaatcgtcgaagaagaaacagggtaatcaaaaaagtcagaaaaagaaaaaaaaagggcagaaagaaagagaagcaaatgctgaaaccatatcagataatagagaatttaaaattatttcaaaacccatgtacttatccgctaaattctgtttggccaccaggtagaagatctgccgtattagtacttttatttattggcaacagaggagaattacgagtattattaactaaacggtcaagaaagctaaggtcattttcgggccaagtttctttacctggtgggaaagccgattcaccctcagaaacatttgattcaattgcgagaagagaagcaatggaagaaatcgggttacccatggatcccactattttacaaaataaatataacatgaaacttgaactagcttctagtgagattccttgctatatgtcaaagacattattaagtgtgaaaccagttatctatttcctatataatagtgattgcgacattgctaccagcaacactcaaggtgtgagtgataataaatatagtaaaccactaaatgtgataaatttttttggtaaactaaaccctggcgagacatcatctctattctccataccaataaatgatttaatatatgaggatctgaaacaacagaaatatgaaccagaatattcgagtaaaatatccaataatataaattggggtggattaatatggaatgtgaaacatttccattatcccattgataaccacaaagatgtaacatggttgaaccgtatggaagatttaagtgtaagtacctctacctcggagtatgaagacaatatgaattatataaaacagataaaatacagagacgtatggggtcttacagctaagatcatagcagatattgctgcaatcggtaataatttagatatcaacgacagttataaacgaagtatgggacatgaagacttaatttatgggttacatgatttaggtcatcaattccaagcagatggaagaagtaaatgggagaaagcattaatcaataataaacctggtaccaaatattctgatgttttaccagagacttttataacacaattaaaaaagaattcactatcattttaatatcatcgagtatgttattattattgatattattattattattactattttgcttttctgttcaatattctgattgaaccattatcagttctgaaaatatgtataatgtataatgtaaatattccttatttcaataaaaattgtcaggtattttgctgggcagtaaaatcgtgttaaaaacaattttgagggctaatgaacaaaaaaaattaaattgcaaaaaatacgaacttgattcaacgtcagaaaactgcactcgcgggattcgaacacacgtcttttatatatacatatcttttttgttttttttttctggaaaaagcatacagccgtctgttgccaaggagatcaaagacagaaagtgctgctgcggctgataagacacaatttgtatttgatcataatatatatatatatgtatatagccagtggttgttgcagacattcaatatcaaacaataataggcaacaaatagcagacagcatacaacaggtaaacttctgcaatattcgactccaactgtttgatctgaacagtcctactttatattaatcaaagttgaatcaagtgtcagagttatagaatataatattactgcatattgccaatattccctttactaaatataatatactatcagttgacttcacttctatctaaacacacacatatacaaaactaaacaactgcttgtaacaggggaaaaaattatttggtcataatgggaactcctattcgaaaagatatgtcacagaatgttgtcacatcatatgatagtgataatcaggataaacaggtcccacttctgtcatctattgagccgagtatcttatccaagttattgaagacacatggcccattagcaatgcgacacataacccagctgttaagtgaagagattccacaatttcaggacatgtcatcctccaaaaagagaagattgataatgaatgcgttagaaaaaggagatgaaagaaacaaggtattgtttcaaaaggtcggttggggactatggcaaatagagatggtcgatccaaatataccgtttgaacaacagcgtcaaattgtcaactcgttaaataaacaaaggaaagattctatatcaaatgatactcgtcatgatattaatgcagccatagtaaagaaagatacaaagagtgatccgatatcgactactctggtagtatctcctcctaaaccggtgtatatagatgagtttgctgtaagtttatcatcagatgaggaagatgagaacttcgaagaaaatcaaacaggttatatggaggattcgaaggcacaaatgacacaacgtagaagaggttcttctaatatctattccatgaaaaggagggtatcgagtgtggtaaatagtgtagataacataatatcacaaccaacaatccattcgaatatggaactgtgttccacttctttctcttccattaccgcaaccaccagcaacacattattattactaccaccacagaaaggacattcattcacaaagaaccgtacaagaaggtccagttcagctaaaccaaaggctataaatatatccgatgatggatatttataccatcaaaactaccactaccatcatcatcatacaccattgcagagagtaagatcaacgtcaatatcaaaggaatccagccttcgtactacgttaaataacaacaacaataatacaataattaccccattaacttcaacatcccaattttccttaaaattagatacattagaaacttacaatataaatatgaaagaaaaagaaaataataacccatcatcacaaacattagaatcagataaatcgtcaaatttcctactggaaagaaaaaaggaagaaaggtatgaaaaatcagataacaaatcagatacagaagaagaagattggaaaaatatggatccaagaatgcttacaaggaaaaatattgaagatactacaattactgatcataattacactactgcagacacaaaagaagttgctagtcttttattgtcgttaaaatgacacacaaaaatccatataaatattaccaaacaattaaataaaagagtacttgcaaatacagattagaattattaatacatatatgtatatatatgtatatatataaccacagtctcatatatatatccttctattctttatatcaatgacctaataggagttttctttacagtataatgttaaaaaaaagacaagatataatttttttttaattttttaaagtctacaagaacaaaaattgcaaaaacagaaaaaaaacgtctctgaggggagaagaaagatcaaacttttacaaccgacacatgaatacacaaatattatatatatatatatatatgttatacatatgtacctacacacacacacacatatatatatatatggataccctatagatctgttagaatatataagtctcatgtaggaggagtcgtaatattttctttgtctctcttttaagtaacatataatatagtctatttcttcttttaaatctgtttgttagactattctaatggtcataataagccagatccaatactcatcaatccaactcatcctgcatacttaaatagtaactttgttttctgtttattacatatatttgtatccatatacaaattcacatctacatatcaataagttacataagactttattctttgtccctaccctccctttttttttgctttttaattgtatatttgttatatcacttaccaatacccatatcattgcattattatatattctaattgatctgcatttcattaaatctactcatttataatatatccagtctataaggcattttctctacattaattatcagcacaacttatcgaaaataataactatccctctcccctctccaccaaaaaaagaaacgaatactaaaacatcaacatattatacctgaataaactaccaatatgacaatcgataacaaaactaaccaggacgaatttgaagatgaatctctcaatactggttcagatcgagtctaccaaaactatatgatgcctggcttagaattgtatgatgcaaaaataacaataaaccattggcaattaagagactgtattaaaccatattctagagatccaagtagactctattatatttatgatcattctattcgaacgttagataccaacccctctattttgtcccaaaataattcaaattttagtaaaaatgataattataaactttctaaaccgaaatatgcaaatagattatgccgtcgtcattctatctataataatagaccttcttctaagacaaataatttaaagtcccccttgtatgttaattttaaaacaccatctaaaaaacttgtagaatttaattttaaacctagatgtttcaccgaattaaatggcttaactgcatgtggtggtcttatcggatctgatgataaaggttttccaaccaattggaatagattgtcacatgaaaaaaatggatcaaattctccaatcccagcaccagctcaaccaatcagcattgcatcaacaggtgtattaatggataacagtaactattcaaattcttctatatggaagggaatcttatccttgtacaatgaaaatatggatttctctttaactttaatattgggacaatttattaacaattgcgttactttatcccagaattcaacaaataattatgatatctatacatgtaataacgatagtcatatctatcactgtaatataagtaaccgtgatgtccagttactaagacgttattcagatttgaaatttccattaaacaatgcagccttatctcatgatgggaagattatggttgtatctggtgatacaaacaaatttgctttatatagaaaagatgaattaactgatttatttacactaaattacgatccaagtctaaattgggattcgacatatggtagtagtaatgaaacctatacagttaaaagacgaacaaggtttaatgttccttgttcatccgaaaaattagattcgaacatttatacaactaggaaaggtgatcacggtttttataattgtttctctgaaaatgatttacattttgctacactatttcaaaacggggtttgcttaatctatgatataagaaacctagaacatccattagccgaaataacatcaacaagaccgcattcacataacggttcatttagagtttgtagatttagttacggacttgacgatttattatttatatcagaacatcaagggagagtccatgttgtggacacaaggaattttgataatcaccaagttattatgattccagatacagtgcaagcagtagatagttctatgaaacaaaataggattcatgaagcagatgtaagtccagtttttttcaataatagtccacataacggtattgataataataatgatagacgagactcaaattatccacttttacccacaggttcaaactcattgtctccatctattacaaattctacgtcctctttatttggtaataatagtaataatagagtttcatcaaatagaaataatatacatatttcaaattccaaaaggcgcttttctgccccatcatctacaaaaataatcgatccacgaatcacccaggctttaaccattccaatcaaatacctggaaccagaaattttaccattccctagagtccttgataagacaccaatatctaatcattatagtacttatcaatatggtggaaggaatgcacaaacctattcccatcatttacactacccatcgaatacaaatgtggattcatcatcacattcccttgagttatctgattctattataagaggggataatactttaaatagctcatctagtatcaacaacaataacaatggcaacgacaacaataggaacgcttttaggattaggagattttctaccacttcaactaatacagatgaccaagattatccattttatgaagatgacgatttcgccattgatcccgatatttcgataccggctaacgcggaagataacaaccaaagatcaggaaattcgttatttgatgatcttttaaccaacgaatcaagatatctagcaagacattcaagaaatagaagcaatgattacatgaacaataatgatgatacattttattctggtccatatgatactgtaactaatacattgtaccattctccaacattcaatgaacgtaccgtattggattttcctgataatgaatttggtgaagaaaataacatttctggtattgactggatacaagatcgtagcggatcttcattaattattggtactgattatggcatcattaagtggaacatcaattcttgggcaagaagaagtttttcaagctatgatttttgttaattaattatacgttattttttctttctaatttttgttaattaattatacgttattttttctttctaatttttgttattattattacaattaagtccaacaaaaaatagcagagttttcatcacaacattttacatcatcaatatattattaacaaaatatgaaactataatatatttttctctccctgctttttctttcttttctttctacatttctatttccaatatttttattgtttctttccttttcacatctataaattaatatatacacaccattacgtagtcagacaataaattatatattcatcatttttttatcttaatagcaattcattattgctattattattccattttattttcaatataattacaacttccatttgtccaattgttcttgagtaatattaagcgattcatcaatattattgatactgatatcactacataaacaacattttgttgtcattaaagattctaattttgaaaccaacacctgatcctttttaaattttttcttatcatttgaaatttttttctgtataacatctaattgattctttaaaatgatattgtccgaattataaaccattttaataaaacaattacaatggaaacaatgattacatggaaataccaagaactttcttgtagttaataatttgtgacataaatcgcacgattgactagcctctaaaatttcatacctttcattaaatgcctgcatttgttccacaataattttctttaatttgattgaatttttaatctctttgttcatatcgttcatagtctcattgtaattatccaaacttgccaaaatttcatcctttatatggcccatagttaccatatcgttaaaaattggtaaaagatctttaatttggatcagtccatcagaatctttaattattgaccgaataatagccttaacatcgctatttgtatttgatatggaatcattcatgccattaatagtagcattgtacaacagtttttcagccaacctcaaaaataattttttctttaatattttatcatcaatttcatttaaagtttgtttagccaagtcaataaaattattttcaagtgataaatttattgcattctgaaacaatttcagttttatcattagatatattgaaaccttatctctttgaaaatttaaacttaaccttaaaataaaattaatatcatatttatttcttccatattgatttaaacattcaatcacgttataatctgtatcgttataattcttataatcattattagtagtcatcgaagagatagaagcgtgcttttcagtattatttttacttttgttattataatatgtatcacttatcaacatatataatgttgtattataaattatcttgtcctttggatcgtatttattgatgtaccactgtaaatacgtcaatccaaaattaacgttcgaatcactttgaacttgatttttctgatatacagtaaagtaacttagtatagctggtatcaatttcactggatcaatttcgaatcctaactgcatccatttctcgattgtcaattctggacaattaattaatagaattgtagaatattgatagattagagataaatcagcgcttttttttaggatttttaacgattcataccaattttcctttttaatccaatattttaaaataaatttccaatcattatttaatgttgcaatctcaattaataaatgattacacttttcataatttgctacaatttggtagattgtgtcaaaatccaaaagatgtttatatgtcttacagaagtgtaaaactgttttttccacaccttcaatcgaatcatcaatcggaatttccattgaattatacaatggattttccatagaacgttggaacaagtaatttaaatgtttaatataatttcttattatccaattagttaacagacaaaattgaactttatataatgttgcatgcggatcacgatcattcaattgttttagcttagttaaaagatatgtctgtagaccaaagtcattatctttatcatttccgggattcatttttaggcctagtatttttaagatgttggaacttacagagaatgaattagagattgccaattgtttagcgccctcattaaagttttctgttgaatcagatagataatagtttgccattttataatggatcagatcgacctgccatgatttcagtccattcaaacttaatgctttttgaaaatcattttgttcacataatagatcccaaaggatctctgaagcattcttgattatcatctcatatatagtcaaatttgaaattaaccaaattgtatttttcaatggatcgaaaacaagattcgttattggatatagagtatcgatcccttcgttgaatacaatcttattatttaatttgttgattataatgatacgattatctttatgaaacaacaatatgatgaaatattctaatataagggcatcctttagactgttataatctattgattcaggtaattccaatggaagaaacacattaaagttgtttaaagaaaattttgagtcatttaaaggttgtgttctattagtagttggatttaaatcaccataaatgatgcccattgcagtgatccaaagaaattgatccaaactgtttgaatgaaatctttttttaagaaatgaagttgacgctttatatctggtgaatttttccaattgaagaggactgttgaataccttatctagggaaaaaaactcatctttattgttcatactgttgccacgactactactcttactatcttcattaattgaccaatacattatggaatcattaacaaccagtaggaaaatatgatttatttttgaatataaaaatccatcgatgtgattatttttattgtttgagagactgagtacaagtttaattgaattatcagttagagaaacccaaaggatttcattttggacagtggaacacaaaaaccgatcctcatccagccattggaccaatttaacatcatttagatttgttgtttttcctctattattgggaagaagttgtctagcagtagtagctgtgttcgaattggatggtgataatagattggggatgtaaatgtaatgatatttatcaaaatttgtctttatcagcagatattttgcacctttagagagccatgaattgagaactatttcccccttaaccgcggaatcattaccattccttgtgttgctgctgttcctggtgacattgctattgcataaatctaattcgtattgaccgatatgttcagggttaaccaagtcaatgacatagagttgtccaaagacggtgactaaagtgaaaatatttgttgatacttgtaaactggctacatggtttctttccgtcagtggaacgaaatccaaagaaacttcttcaaattgcacattcatcttagatgcgtatatataatttgaactaccttttactttatgcgtgtatctctcatttatgtcatctccttgtatctatctaatcgactctcctctctctctccctctccctctcttcccatctatatgtatacttcaaaaaatcctttataaatggagtgtttaactcataaaaacaaaacgaagaaaagagcaaataaatacaataaacgtaaaggtcataaaagatggtctacaaacattaaaatatatatatatatatatatgaataaagcaagggatataaacgcaaatgagtatacctattaaattgttaaatgaagcacaaggccatacaataactttagagttatccaatggggacacataccgtgggaaattggtagaatctgaagataacatgaacatgcagttaagagacgtaacgttgacaccaatggagtcacacaagggtgtaacaagaatggataatgtgttcattagagggtcacaaatcagatttataacgttgccagagatgttgaagcatgccccgttgttcaagaaacaagcactaaaaccacaacctccaataagaggacctctcaaccgtggcagaggttgaaagaaacatacattattaataatacatatacatatacatatacatatacatatacacatagataaatattataatcaatagtaacacatatcaaaaaaatgattcattattcttatcatatatcttcttcctattgctgctactattgttgttaccgtcagatgtttttgttacccctgtgatgaaagaagacatgttcatggtcaactctaccaacccttgatcgctggggcctttatctacgagattacaaaactcagttacctcttgttccaaaccattttgcaattgtgccagttctaaagcaatcgaccgaatatcactctgcaattttacactttgttccaacagttcttcaacaatttgcatctctcatctacacacacacatgtatatacatatatatatatgtacatgtacgtagatctgcacactctatatggattgaagttagttattatgttcatcattctgctttattttattttattttattttattttattttgttctgttttgtttctttcgaacagttgaagagaaacaagaaacaactacaagaaacaattgtataagaaagaaagaaattactgtttctactaaggagacaaataaacaaagtcttgaatgtctatgtgtctatgagaaagagattgtggatattggaactacttaggtgcatgacgatttaaaatatgactgaactccaacccagtactggcaaagttcaacaacacaccaaagaccatccttggatcaaggacggatggtttagagaactcagtgacaaatgtttccctggccaggccttcactttacgtgtggataagatccttgaatcctacaagactgagttccaagaagtgttggtcttctacaacaaacagtatggaaacgtcttggtcctagacggaatcattcagtgtactgaaagagacgagtttgcataccaggaaatgattgcacatatccctctttatttacaccacaacccaaagagagtccttatcataggtggcggtgatggtggtgtccttagagaggtccttaaacataaatgtgtcgaggatgcaatcatggtcgagatcgaccaaaatataatctctttagctaaaaaatatttcccatcaatgtcaacaggtttgcaattgcaaccacaatcatcaacaaagactgcagatccagagaaagagactagcaagtttattgatcctagggtccaattgaacatatgtgatggctttgaatatttaaagaaaatctctttgggcccccaggataataaattcgatatcattattacagatagtagtgatccagaaggtcctgctgaagcatttttccacagagactatttccaactgctaaaagattccttgcgggacccaaaccatgggcttatcatctcacagacttctgaaaatgtttggttaaacatggattacttgactggactgattagacaaacccgtagtgtttttagtaacgtagaatattgttacacaatggttccaagttatacgtctggtcaattgggtcttttgatttgcaataataacagagataaaaatttaagagtaccaataagagaacctactgaattagaacaagatcaattgaaatattataataaaaatattcattctgcttcctttgtgttacctaaatgggttgaagctaaatggaataaatccccttaattattgccatcattattttcttcttcttcttctttctcatccctatacagcaactttcagagttcacaaatatcatatacatataaatatccacgtatacattgtattctattttgttatatatatatatatatttcatgcttgattttatccaaaaatatcatctattgcagacttctttttcttactctttttcttacttttcttcttacttttctcattcctcttcttatctgtgttgtataccaaatccatagtcgcaatatcttgatcaacaattttagtttctatcgaacgttgttgtttttgtttttgttcttcctcttctattattacttccgttccaagatcttcatcacttttctttaaagatctcatttcatctatcatctttacagattctatttctctttctctttctccaattacttctattttgttttctgattgtaatttcattaataacgaacgacatctagctaacaaaccaattaacacaacagctaatgtaacaaattgccccatagttaaaacattttggaattcacggtagatagaaggtaattggaactttaaaaatttcctaattaatttctggacctctggtctctccacaatattctgtaaactgacatcctctttcttcctcttattaccgctgttcctatccaattgttgtagtatcttattaatcgatcttttaaatatattaaattgccgccaccaacgggtctttttatgttggttattgtttctatgatacactaaatggatataccagtactctaactgtaaagatcgtacagcatctctcaaatcagacatgttttgttaatattctactattcactcactaaacacactagcacaaatcaaataaatccaccactattccactacaacaaaggaagtatcaattgccctttttctccctacctatcccttacacacgaacgtaaacacaaagataagcacatatgcccagataaatacacacgtgtacatacacgtgtactaatattttaatactgataatgatgatgatgatgatgacaatgatgatgacagtgatgatgctgatgacatttgtgccttcatggattcttttatttagtcattttatcttatctcctgcagttttcaaaagtctccaatcaaaaactttggaaaagttttttttttttttttttcttttgggcttttttttaaaacacacacacacacacaaaaagattgaggagaaattgcattagccgccaaacagtttccccttccttacaagtttctggtttgattccaatgtaaagatgtataactaactatgtaaaacatatgagtacacaatttcgtagatatataagacaaccagcaccagacaaaaaactaaagcaattctactttatgtgaaacatgctccccttctgctccatcccatttttattagtgttgtattaactataataataaatatctagcgtgtgtattatcctaaatctcataagagaggaagaaataaaaaatagaaataagaataaaaataaaaataaaaataaaaaaccaataagtttgcaattccatcatgtatgacagaccaaagtttcctcttcctggtgaacagaacaacttgttagacactatgtctactactacgacagaataccaacctttgccgttaaatttggtatcttccatagaccctagaggtatattgccacccaagatacatgctttgtctccaccttcaagcacgttaactttatcaagaggttttcctatcccaaccaataaattctatggcaatttactactacccaacggtcaggagttgccattatgggtccatccctattctttatggtatagtaaacacgataactctatctgtgtatcctatatttctgctcatcaaagagttttcgacagggacaatttcccgccacagttttactttaatccggttggaattaagtcaattatgttttcaactactcttaccgtctctacttctatatccgttcacaatttaacccatatggcctgccagttggatctaatcgggtctcacaatcaaatgccattaatacagtttccactggtccaaggtacaggtctaataaccgcactatataagttctaccccaatcaatcatcaaagatatgtgtcaagtctatggtgggttttagatcgtttgttagagaaactccacaaagatataaaattgttttaaatgataataagttatggttcttgtattgcaacgatcagtcattagaattgcttatgcaagatccccaaaccatagtatccaatcgcggaataagaaaggacaccacaatacaagttactgtttgggaaagtgatcccaattctatttctttactcgatcaagtcgctggattttaccctatatcttgtcaaatctcactattaacaaaattatcatcatcatcatcatcaacaacaagttccttcgatttatctggttattcttttatatattcaatcagtggtgaatcaatgttgaatccattatgtcatcctgtaccccctaaatgctttatctatgctttaccgcaccatatgaatcgtatctctgaaacgtttttatccaaatacaggatcccctcgtacttgaattctactgtatctggtacaatgactggatttattactgatcgattagatatgaataatgataattatgtacacgatttggatttaatgaaatcaatgtcctttcacccaatggggtttggaaacaatccaccaataataactgacaatgaaattttacaactgatacataatgtagcaacccaagaaatatcacaatgtgatatcttgtctgaatccaatttagattcgatgtatttttctggcaaatgtttagccaaatatgcatggatcttgtattcaacttgttttattataaaggatctagacttaacaaagaaacttttaaaaatgttacaaacagcatttagtagatttatctcaaataatcaaataataccattaaattatgatacaacatggaaaggtgttatatcttctacaaatgaaccaatgaaagacttcggtaattcttattataatgatcaccatttccattatggatattttgttatgactggtgcaatcattattaaagtagaacagtttatttatgggaattctccatggtaccaggatatgaataatcgaaattggatcgaattgctaattagagactataacaatccatcacttaatgatccatggttccctcaatttagatcctttgattggtttaatggccattcctgggctaagggtctctttgaaagtagtgatggtaaagatgaagaatcaagttcagaagacgtaatgtcgatatatgcaattaaattatgggctaatgccacatcaaataacaaccttgaactaattacaaacttgcaattaacaattttgaaagattccataaaccattatttcatttatgatgattcaaatgtgactgaacctccacaatttattttaaataaatgtagtggaatcctctttgaaaataagattcatcataccacctattttggtaataaccttgaatatattcaaatgatccatgctattccaatattacctatatcaacctttataagatcgtctacttttgttcaacaagaatgggatcaattattaaaaaatattgtggataaactaaatgatggttggaagggaattattatgctaaatatggccctatgtgatccgatcctagcatattcatttttctctaatcctcaattcgataaaaaatatttagatgggggacaaagtttaacatggtccttatcatattgtgcatgtttatccttactcttacaagaacaataatataatataatatatatatgtaaatatatatattgagaaaaaataattgaataaataaagaataataaaatattaatggccacctttatgaatatacatatttataatttatcatgattaaaaaagaaaagcaacttatgtgtcatctaaattatatttggaaacaagattacttattttctttaaagcttttggcactttcttattaaccatatgtttggacaactgtactgatgagaacttattagtcttttgtttgtttcgatgtgatgttataaatggattctttgttgataaagaatttttatctgttgtaggatgtagtagtccactattatggtttgacatgtatgcatcatagagactttggctagcatttaagattgattgattcagcggaatattttccttggtatcatttttatcggtaaacatattgttcgaaatgatgccaactttgtcaacattatcactatgattatcagtaacggcagagattgcaccattataagtttgattgtgtaattgctttgaatcaccaacatgaatttctcctctcactgattcgggaaattcttcgtctcgctcatctgattttgtaatggaatcatacaactgcatcaaacggatattatttccatccttatttttattctcattttcaaatactttaggtgacggtggttctacttcatgaaactgctcaaaggtcgtttcatttgatacagaacctaacaatgtttctaatgtaattttactattctgaatacgttcaattaatttttctatcttgttattgctatcagtattactactattatttgttttcttatttgtattgatttttctttttgatttcttatgacttttagtctgatctttggtctttaacttccttttatcacctattctgagttggtttgaatcacttacagatattatccaattatcatcacttgatttctcctgttcaactttatttgataaattatacatagaaattttattagtatttatggttgatacagatttcttagcttcctctgttgaagagctcaacacacgtccatcattggtttcaatattttttgcagatatgtattgcttttcctcgagtattttgttattcttatccttgatcaatattacattctgttcgttttccttaacctctttatccggaatcttatccaaactttttacttccttattcacactttcactgagacttttcaatttttcatttgcacttttaacagaatttttgaactcattacttgatcttttatgaaaatattctaatgtattatttataatcatattggtattttccaattctttattttgtgaatacacgatctcttccattactttaattaattgacctttctcgaacatacgattcattgatcctgatttagtagctacatctgttacctttgtacttttcaagtcgattgaatttccatatactttattactgttagatgtatcatttattccactttgtatatccttcttattgatcaaattagacttcttttcatctgataatttagtagatgctgtagcagtcgttttagcatgattatcctctttttttatagttttattagttttatcttcattaatatattgtacgtttgtatttgatatttgattaatcggtttgaaagtatttgtataagatagcacaagttttggttgttgttttataatgactggattattaatttttgcatcactagctttaatttcaaccttttcctttagcaatcttacaggttcatttcctactagattaagtggacgagttttatactcagggttattgtcatgattagttgaaattgaaatatcttgtgctttttgcaatctaggtgaattattatttggagcaacattacttatagtgcttgaggattgattttgtaactgcttccctctagaagatatggttatcctgttaacactaggggttttagttttttcttcatttttaaacccacattttttattttttcttatatatgaatcaactttagtatcaaattcaacttgatccattcgatcagcatcgacataatgactaaagtattttgataacctttgaaatggtaagatatcatcatagtccataatttcttcttttacaatatcaagaggtactttgtggagttgtcttctcttgatcaatctttgaaactttgatcggtctcttgatgattttctcaacttagtctctatcattgccctttgtacaaatgaactttgagaagcatctttattatttaaaaggttaatcaaaacattttctgtgaaatccaataatttcccgacttctgactggtaatctgacataataatcgaataacccgccaaatatgagctggattaattgaaatcaaatattattccctaacgattatatatggattaatataccctttacttcttatgtagatgtaggaaattttttgttagtttcaatcagctctctatgtttaagaagtacaataatcttacgaattatgatgtttctttcttttgaagatttcttctttatcaattgaataaaaatttcataaggacaaaaaaaaaatcgatcaacacacaaaactaacataagaaagcatcacaaaataaaagtgaaaatctatcaactatatacaattcatacacacacatatacatagatatatattaaaatactttagtctactttagaaccagttcataaccacattctctcaacgtaatacagtatatacatgggtatagaagaaatgaaaatggaacatatatatatattttaatagaagtattgataaccatatttatattcattacctcgatagtcgtaaactttctctaccggatacatttcaagattagtcttagaatataactgattcaaaactaaagaagaagaagaagaaccgcatttacttgggttaaaatataaagttaagtggccatttttaattctatttaaaaataatatgatcgcattgtcgtcattacagaacccagtgacaaaatgtctgtggtttgtaccctttgatacagcgatatcattatataaacccatttcggcggcaatatttgaatccatttctttacttggctcttctttttcctcttcttctttttgttcatcttcagaacaatcgtcatagatgtcttcaatatataaagattcacatgcaaccccaccccattcacatagtgcattccttggtagttcagagattttaacaataatcaaactttctaattgttcatcctccttatcaaaccataatgaagattttaatgacatttcgcgacaatataatgaccatgttttagatatgatagctatcatatttgcatcacgtacaaaacaagtcataaataattgtttttcagtgccaattgtttctttcacagtattgaaatgtttcaaagacaacacagcctgtgttaagtaatcgttttttggtaacatttccattgaactgggtatcagagcaatctgcccactaattctagcaactttatttgcctgatcgctatttagccacgtagcttgggaataagggccaatattacatggtgcccagtatgatcgactttgaacgtgcaaaccatttttatttttattcattttgattttaccatcttgatattcacatattttacttgagtttaggtctataatcacagatagttgaatcggattttcttggcccagtaggtcagatccaacacaggccctagctggtggaagagggccccatttttgtgtatcaaaccatttggaataaatcttatttattctattaaaggcttcaatattagttaaaagcaaggacgacgaaattatttggcatggatataatgctctagatgccaaaatgtgttccaattgtttaaaaatattcaacatatgtgcctctaaagaatattgtaaattatcatttccaataaatggaagtgtggaagttaaattcgagatataaagaagatcgttaacttctacaacagacacatttggaataaatttgtaatcagatggtaacgaagatggtaaaatcgataaagtggttagttcaacagatgcaagcttttcaaccaagttactgatggtatcattatttttcaaattatctaacaattcttgccatttctcatctagcaaagctggttcaggcaatctttccaattcatgtttaaaaaaattatcagacacttgtcttggttgatagtctacaatcaatctagcattataaaccccattgttctgttcctttgaatcagatgtaatctccatattttttaatttcaaataaccatctttgaaaaacggcgagtctaataccatagtctcgaattcaccaccttcaccacaaacattgacctcgtatttattattcaaattcatcataataagctgaatctgtggcagagtcatatttaaatgacgagaattcaatccaattgcagccactttaaccaaccttgcatcgaaataacctttaccacttgtatcttcatcatcattattactactgccgttttcatcgtattgagtagaaagtgtagacatagtgaccatttcacttagtaattcagattgatctctctgccatagataactcaaaacggtaagtcccaatctgttgcaaacgtcttcgacacgaactctttgatatgaggaaaggatagcaccgacactgacagcctgtaattcaggcaatttggatttgatctccttcaacaattgatacaaaacttcaatttcgtcgtcgttggatacagtgacataatttaattctttgttaatcgaagaatctattctgattggttttctaaacagtggcacattacaacacctactgtataaagatattaaatcatgtcctacagtttgaaacataaaactgtttaaatcttgaatttcttcgtcattaggatataggttagccaatgctataagttgatgaccttgtttcaaacaatgtaagatattaaaaaaactatctttcccacctgatattaaagctgcgaatttcatacttaaagtgaattcttataatccatacatatatagaaatcaagatttcggcgcattaattaatagtttcttgtttggtatcctctgtccaagccctatttgttagtatatctacttaaagattaaccttttatgttttaagttaattttatttatttatttatttatttatttatttatttatttatttttctggttcattttatttgtttaacttatttataagtaaaaaataacaagtggtatactattaaaaaaaaaaaaattcatgatgacgatgatgattatttattattattatattgagtagtgaatattaccatacttacagttacaggggtctatatataatgacatactatggattaaagaagaaaaaaaccaaaaaaaaaaaagaaggaaaggatagatggcacagttaggttgggaagaggcatgtgagtaaacgtgtatacaataaatatacaaaaatgaacacctaaaatcggaacttccagtactaattgatttagaataaagcttttgcgactttcttgactaatccccatccattatcacttctaactgcatctccattttcttgtaatctacgcaacagataatctcttgtctcttttgttgggccccatggaacgtatttaatcaaattatgcatatggtagttattgattaaattgtatgccaaattatcggacatacccaacaattggccaagtgaaacattagctctaacgtatgtatcttcagacaattgatccaataggacagctgctttgatttgagattctgcgttatgggaggccacaaccaaatgcccatacacagaatctttaccattatttttcatgtcattgagaaccatggtcattatattatcgtagttgttgtctgtgctctcttttgtactgaagatgatagagtttctatttggttcagaatgaatgtaggcgccacggacaatctttaatgctaatctataaccgttttgtttagccagtaaagcatcattagtcagatgttttatggaatctgacaaatatagttgccaagtaccggccacagagatcaaaggatcgcgattaaatttttgcatcaattggcgttgtaaattgtatacacctttagtttgccaatcaaatttttctgcgtcaatggtagaaacgaagaagggtgacttacgtgatggatagatcttggataattgttgattcaaatcatggaccacttgagtgattcttgcacagcggtcgaacaacactttcgagtctggatgagtaccataattcattaaaatgtcattcggattttcaattagtgcagagggtttcaaagcgatataccctggtgcaattgtgttaatattttgttcatcggtaagagaatccaactgagataataagttaggtttcaataccttgtagatggattcgatagttgggtccactatactttggtcgatattttctatttgcttaaccccttcagaattttcgattgttaaagaaagcatcatatttgagatacctcttttttgtaactcttgaccacattgtaagacttcttgcatgttttcaccaccacagtaaagctttgataccaggatgcgaactaaagagagtggaataaatgggaaaatatatgtagcagttgataaagtcaatttatttaatgaacacacaccgattaggaatagagaaaataaggtttgttttggtaaagttttgaaatattcttcataagtggggaaagaaggggagggagaagtagaagaagaaggaaaggaagagataactgtagttgaattagagatagatgtggatgtagatataggattagaggtagaagttgtagcagttgtattttcaggagtatataatagtgagtttccagtattttctttcatgttagttcctgaaacataatgacgataaaacatagcagatgtcatatcattcttaaatagtttaaaatcgaagagtttaaaaggaagtattgtttgtgttttagtggtgatacgatgaatacccattataagtatatgtgtgatattgtattatatatgtattttaatcctttaaaagaaaaataaaaaataaaaaagaaaaaagagcaataaaatagaataaaagtgtaaaaacaaaacagatactaatagaaagttagataaggaatattatctgatataaattatatattgatccttttatagaaaggtttaggtgagtagttagttgtatatgatgattctaggcaaaaatcgttattagaatattcaaagtaataataaaaatcaataatatgtcgtaggagaggaaagaaaaaaaaaataaatgaataaggaagaaataaacgattggataattattggaatagcaaaagttatgaagtatatatatatatgtgggagtttgtagaaaattatagaaacaaatggctataacggtgttaatcagtcaacaaacaagtcacattaaaaacaaaaaataaaataaaataaaataaaataaaataaaagacataaacaaatgaatagataaacaaggacacatgaaatattacataatcctaaggatagattgataagagaagaacagatagacaaatcaaaacaaaccaaattttgcataaatcaacacaagtaatcactatctattttgtgtctacacatacgttcccaaacgcacaaacaaacacacatgcgtatggtataatttcctgagcactctgtaatgccattctcattctacttattgccataactgtcataactgccatttatcatcatttattatcatttattatcacttatcatcatttattgataataataacaattgtatcagccgtttctatctcacatcaattacaataaatataataaatataataaatacggtaaatgtgacaaaaacaagaaaaaacacatacaaaaaatagacggaactcggtttccgtgtctttttttttttcatttttattttaatttttttgggagaattcgtccggaaaacgaattcctgccgttggaattgggaataacaatttgggtgtttgggtgtttttgtatctgtttgccttccccccccccttctccctgaattcttttattttattttattttattttattttccagttctttgtgtctcgaagtttttgtttcgatttatacatgtgactgatctgactcagcaaacagagttccatcgaatgtctcataagtaatccacactgcttatattctcttctgttacgccagcattggcacagaatgatatcttataacaataatattacatattgtagcgtaccactactatattattattattattattattatactctactctattgtattatattatctagactaaatttattagaaattcattctctcaaacactttgacagtagatggccatatataatcctcctcttcctcttcctcttcttcttcttcttctcttgtttcccttcccatgtcatcctcatctatcataacatataatctattggtaattatattattactatcactataatgatggctgttcccaccagttccaggtggggtcatacttaatatactaccaaaataatgatataatgtatctaaatattgtcttgatttcaactgatcttttctttcaagattctctctctctctctctatcaatcttaactctaactcgttatctaatcttttattcaatatcttattaattattgatccccattcaatataactactatcatcgtttactatttcaaagttatatttattcttcctttgcatcgttatctcttcttcactatttatctttattttattacctcttttggatatagaaagtgtaccctttctcattaatccaattatcattttcaattcttgatcaattgggttcttaatcaacctactatattcactttgtagatttatatcataatcgtaactattatttcctctttcaaatccactattagtactcttaatatcatcatatatatctatatcattataattagtgttattaattactattgggattggatgatttaatttatcatataccatttcatttattagtgaccgtaaaaaccatctttccttaaatattttcatcatcatcatgttattattattattattattattattattattattactaacatctttatcatccaatttcatttcaaatttgtttattgtattaataacttcaatagatttattcatttcaatatgccttttgggtctatcctgtctcattagtatgatccccttaaagatctcttctttagtaatgacatgtggatacaacatcctatcattcttatctgctttctctccttcctctccttcctctttatcattatcattatcgctattattattattattactattccttttattccttattatataatctctttctttattcttcactgacaatttaatagctttcctatattttttatttaatatcttcttgaaattcatcctattattatatcgaaataacctatttacatggtctccatgaatacttcttttattaattcttgacagtatcgtaaaatataaaatatctcgaatgtaatttctaacacatgtttcaatgtattccatagattctttattaagtggtaatggttgaattgtttttcttttccctctttttattgttgttgttgttatggcattatttgtttcattttcatccacaggtgtatattgtaatactctatgttctttccccttcaattctattatctccttttggatttcataaagtttgttggaatcttgtttataattcatttcatctccaatgaattccggatatcttgtatcgacatccatattcttatcatcattaatactctttcgataaaattggttccatatttgattccatttgtcaaaattcacaattaaattattgttattgttattattattgttattattattattgctattcccgttactttggatattgctgttgttattactgttcaccggttcattatcataataatattccaattcatctttatcaattagtctttgactcatatgttcatcgaattcaataaaattgtcatccatctcatacgatataggataatcctcatatttatacaaaaggttaggtaatctctctttaactgatttcaggtttctctgtaatacattatagtatgttaatacttctattttgctctttgtaccattaaaatatgggtaccaatcatctagtctatgaattgaatatctgcttaaaagattaaaaaacattcttttctcacttgatgtccaaaaagaaccatactcaatcacttcactctcctcgtctaattcacccatctcatcatactcggcatctgaaacagcgtttgcttgatcacttttatgtttatgaaattcataagtactattgacatgaacgtaggaagaatgtaatttcggatacatatttggtgtgcaatcaaaaaaattggtgacttctctattgtaccatttgatatattgtgtcgtcacatcataataatttatgcatcttcccgaatgaccattatttgataattttataatatcgattgatttcttaccatcttgcctcaagtttcttttccttattctacccattctcttatcatttaattatttagtcagcatcatttatacatctctagttgatttgtagacagaaatacaaaatatcattgatgtatcaaaatcgaaatacaaatcagttagagttttcataaagatacatggactggcttacttatctattgatttaatttcctagtgccttctcttttttttttttttcttcatatatttatttatttgtgtattatttattttttctttaatttaaattcttaatgtcgaccaaaaaaaaaaaaaataatcaaaataataataaaatttcaataaaacaaaactttttcaacattaaatttagggttgtaataatatatacacaaataatttcccattattttagaacaaacatagggtttttgcaaaactaaaatatgtttttcatttttttatttgtgatatcgttgttttcccttttcaatatcttgaaagaaaaaaaaaaaacaaaaacaaaaacaaataagaagtaacagaaaagaaagtaaatattcaatgggttggaactatttactaccgctactcctcgaactctctcgaacttaggaagagatatcattcatctctctctttatatatatataacctgacacaaatagttttattctttcgtatattcccttgaaaaaaaaagatacacagaatattaatcagatcttaatataagcatcttcacacgcacacacatataataagactgagataaacattaggtgatttagctatggtatacactttaatataatgtcactattattgaaatgttattataataaattaataacttggaagtatttaaattacaccaataaattgtggtattcacttgtaaataatattgataacagcatttctacaaataatactatagataataacaccgaggatcacaacgatagaactaccatcactgatgctaatacaattactactataagtgctatcacttgtaccatccccactgctcctgttagctcatcattattgccaacatctgaaaattgtggaaacaataaagaagatgttcacaatgtgaccaggggtaagaaaattaagccacagaaaccacatattcttgtattagatttaaaacaaagtggtctgttgccaaatactcaaaaaaataatcacaaacatactaaaaaaaataatcattcaaatagaatggatcgtcccaattataataatagtaataataataatacaaaacatattacaatcttagaaggggtggacttaggtgacaataataacgcttataaaaatactgatcctagtaacgggtgtagtaaaaataatagcaataataatattattatcgataattcgaataatgtttatcttcgtgatccgaaaggacaatcatctaacacgctattacaatttgaatctaaacttacaaatgaacaaatcatccaatctatcgattctatgagaccgcctactacagaagtgtcgagtaaaatatttgatgaattagtagaaagattaaatgacggatataccgtcaaacaattacgttattatatatcaacgaaatcttttacaagaatatccacatcaaaattggttaaattagatatagtgaaaagattgttgaatgacgtttggaatctaaaagtttcgtctaaaatgaatactatgaatagttattcaatgtcacacaaaattatcaatttaaatgatgttcaaacgaagttattgttattgacacaaaatggtaaaattttaaaaaatttatctagattggataagaatcttctgattcaattagattattcgaataatcaattaaagttgtggggaaatgaatcagttttgaaatatattgaaatttcaataactaatatattaaaaaacatattaatgacgaagtggatgccttcaactaactcatctacctcttcaactactacttcttacaataataaaatcatctctaggataacaagactctgtgatgtggatataaacctggataaaaatgaaatttttgcctttggtaataaaagaattcaattagctaaaagactactattatgggcagattaccttaatatggaagtatcaagagcgtattcagattattggaaacaagccattgatcaagttagttcgaatactaataaagaaaaccaattccaatggttcccctttgttgatatacaaactttaaattggttaagacagattgaaccatttgaaattttgcgtgaaatttgcccaatcaagaatgaatcatataaagaattaacatctgattctcttaataatctattgacagatgaaaagattgataaattttataatttctttaaccatgcaaataaggcctctgttataaatttaaaaccaaatgtatctaatatattgagtatatcattaggtcaagtcttaagaccaaataaaaaagcatcactgacatctcctatgccactttgttcttcttcttcctctaatgtcgaagagtcgtcatctttttcttccttgcactcaaactggattttccattcaagaattccacagttatcagaaaaattattgaaattacctctttttgataaagagtttactaaagatgaattattattaacagatcaacatgactattatttacaaataatattaacccccgataggaagcaatttgaagaatctatgaataatcatacgcctttaaaagatcaaccattagaattatggttacaaatagatgaaaataatcaaattattcttgattcagtacaggctattattcccattttaagagaaaattatttaattcaaacaccagaacgtccatttgattacagaatctctaatgattatgttatgaatgttgaagctacattagaatcccagcccggattaatctcttttttaaatgagatcaaaatgagtaattttatcgataatgttaaaataccatataatttatgtttgaataatcccataggattatcggataccaaacatttaattccaacgattggatataattatgttacttgtaataggcataaaattttaaaattgaaatatatggataaatattgtgttcaatattctgaaatcgatggaggtaactttggtggtaaaagtcaacaaatagattttatttctagcgattcaaaaccaacaaaaaaagaattcagggcttttattaaggatatttttatgttctgattaaattcctatgaagaatatagtagaaagtatgcatgtgttgttataaatacttttaggaagaaattccgtcattgttttatagattccttttactaatcatcttgtatatagatatagatatagatacatatttttaagaaatgtaaaaatctggattttcttgaaataatttattgcatgcatgttaactaaatatgcattagaaagattaatacaaacaacaagattaatgcaaatagatattatataatgcaaatttttcttttaatacaaaattatcaacacaacgttgtcaagcaaaattatgtttacaaatacattgaaaaaacagctactaataatcagataaaagagccaatagacaacgtttataggcaaaacaacactaatatacaatgatgatggatgttcgattaaaatctgaatttcttgcctatcttgttggaaaatttttccattaacgtatttgattttggatgccctccatgatttcctgtagcggatggacttgtaactggatattcttcttcatcttcttcatttagataaacattaatattatcattgttatctctattattgttagcatttgtttgaggtgctggagcttggcctaaggcatgtaatcttcgttgtctctcaaattcagtctctgactcttcttctgaatcatcaatatattcatcagtatatgattcatcagtagtatccccttcatcgtcattataactgtcttctctactactattgtcaatctcttcactatctgatatagatgcgtgtcttgctactttatgaggtgctggagttaacgttctatgtttttttgtcaattgttcaagtggtatatcattgtcaagagacgttgaagatggtattgtatttgcatctgagctaattgaaatattccgacgtattcctacagaatttagcactctattgacaattgcatcagatttttttttctgtgagcttggatggtggtgaatcatatatctccttataatctcaccatcctcattttcaataattaaatgctggtccatcttataagcgtgatacttggttttttttttagaaatatgagattgttcatccacattgctgtctttagaagatatggtatttctttgagattgactgtcatcgactaaagattgtattttatgaagagattcaggagataaaattttctttaatggtgccaatggtctactagaagctatactttgaattggagatatatgagattcactttgagaataactgtctattctacttccctcttcttcatctctaggagggttacctatttcagcttgttcaacaatttcaccatgtttattttcaataataaggtgtgtgccatctatatatgcagtgtttcctgtgtgttcatcttcttctatttttcttcttttttcctcttcttccaatgtagtagaggagacatcgtctaaatctttatgaacattcttaatacccatttctatatcttgaggataatgatcaggaatagcctgttgaggatcatattcatcaaagttatcttcttcttcactgtcaatattttcttccgtttccatatcagattcatacattggatagttatttaacgcctctactggggatgtaactacaatagattcataacttcctccttcttcaggtaagttgctagaattacttctgttttctattctcccattataaggttgaatcctgtccaggtcatcatcatgcaattctgtcggcctaacagatggggttaatgcaaaagtagcagcacgagcctccctttcacgttgtaatctttctcttcctaaatcgtttaattcatcgttgtgtgatttggaaccaaaaatttctctttgaacagaagagatctttctcgtatgttttctcaacttacttttcttttttccttgttttcttcttctcatcccacctgcaggctttgcaggtataccactagtttccacagtactcgttctagagatctccttctgtgtgaaagtatccaatctatgaagtgaaaaggaacgacctgcagcatccaaagatggcaatctttgcatccaagaggattttccattcccatttgtagtatgggtagtaaaagtcttggttaatgttattgaattcaaatggcgccccaaagtgatgactgcgactgaagagccatgaacaatgattgatgtgacaataaaaaaacaagtcatgggccaaacacaagccattaactgccaatgttcagtgcctttcggtggaatatgtttcaagggggttggttcatcagtaacatgagcttccagttctgcacgagacaaaatcgcagcaaagattgcacctacaccaattggaccgaaatggcctacgaagatagcttctctccatgatttgatatcaggtataaaaggtttaagtatcatcaccgctggtattcttcttaaaaaaatgacaatgatcgataataagatcaatctccaaacgttgcaaccaatctcgccattattaaattgactccagggaatgatagcaccgaaatagatgaaatatgcataatttaataaaagatcaataactgtggagactttactttcttcagttttatcactaaaccaaccatcccaggcgaatgttgtacctgcagcaaaggatgtcaacagatcatcaacccctaaaatagaaccgaacccagcacagcagaatgcaagaaccacataaaaggccaaaaaggattcacgatcgataatatttttctcttcagcgaatttaattgatcttcttccaatgtatccgatgaaaatccctagaatacatccaaagatgcattcgtatagaatggtgacacagatccaatctttaactatttcacgtccgtttccaggatgcaaaataagattcattgataaataaatgaacgggaaagccataccatcattacaaccggattctgcggataacaaatttctcaagtggcctggcactcttttagcaaacttacctgatacaacagattgtgctaaaataggatccgtggcagtgatacatgcggatattaataaactggaaggaaaatttagccctggtataatgatccagacaaataatccaataatcagccagcccgcagtcattacaggaactaatagtaagaccactgataaccaatgtttaagcatgtattttcttggtaattcgacagcaacagcaaaaatttgtaaacacaagacaattcttgttatttctaatgtaatggaatccgaattcccccatgtcaatggattaaaccaatttaaacaaaccggccctacaattagaccaaatataccggcaacggtagattcaccaatatataatttttctttaacaaataaagacactaaagaaaagatggaggaaaaaacaccaacacatgcataagcaacatgtgcctttgatacctctaactgttcccagactgccataattcaatccctataaataaacaatgatattatagaacagttaaaaaggaaagtgtaatacagttaacaaaaataatcaattgaagtaaaaaaaaattaaaaataagaataaaaaaaagaattgaaatgatattgagtggtatatttgatttgaatatgcaaatgttaataatgataatgacaataatatttaaaatgagtgtagcgaaaagataagaatactagcagtaataatgatagagtagggggggggtagaaatgttgcagttgttttcttcacttcactccacgatatgaatattagtataatgggggggttgtgtgttgctaaataaaatgcaataaagtcacttggaaaactatttagtgatagaaagtcaaaaattgtaacaattaaataaaatagtacgcgatgaaattatagttacaacttgtttcagacaactatttgatagtgtatagtgaatagcttacacaaatcaaacggatatttatgatgtctgctaattaaatggaataaagaaaatgggaataaaaaaagaaaaaagaaaaaaaagaaaaaacagattataattattattaaactcttgtaatatgatatagtataacgctggactagtagtgaaccattaaacattcaactgattaaccaacgaagtaatcaagtgattcaaaagagctagcccacatatttagtcatatatgggcacaggcaccataaaacacccataatatatgactaagataatctgttatataatttcagagatgaggaggctattttttttttctttgctccgcacaatttcgaagaaaaaaaaatataaaataaaaaaaagaaaagaaaagaagaaaaagaaggaaaaaaaaataataacaataacaatgacaatagcgataacaattttcgatggcccccgtttattttataacaggatatagatataatgaaaatatataatatagatatggatatggatgcactcgattgtgccttacaagaaacaatgattgcagtttaattgttataactaatgcatatgcatgcctgtgctggatatatttggatatatagataacataactacacctatgtaattggtttagttgactgtaaatagatttacctattttatcatgtaaagattgaaacgagattttttccactctaaagtgtctattgaataaaccgaccatgtatcctgttcaatcgcttgctctaaaaatgtagtaacaacctcttgtgaccttaaatgaacaccaatcagaattacaacagtgacagatccattgttatcgtcttctagataataggctctcaattgttgtattgtattaaggaatggtttgataagaaaatcattgtaaataacatccatagctactatatacacagttttactttctagctgcttcattgtatctaacgaaggatacaaactcgatatcgattcattatccaatttaaatgtttcccaatcaatgcattcaatttctaaaaaaagctttggtctctccagagctttcctttcagtatctgtatcatttttctctacaatagaactatcgtcgccacatggctcaatatttaaactctttgaatatatttctcttaatattatttgtgaacaattctcttttatattatatttaagtttatttaatatcccctgttgatctgtcccaatgtaatagtccacataattacctaacactattggtaaaataccagatattcccgaacctaattctataacacactttttatgatcctctttactgtctttagcgatttctttattagatatagattgtaaatttaaaatagaagaaatttgaacatacggattatccttttttagtggagtatctatttcttcttcttcaagagattctctttctaatggataattacttatcccagatctaaatacattcgcagctggatcatataatagccatttaagaaaaaatggggtaatagaccataaaacataacctgtagtggaattattattatcccttgaagaattaaggcttgtcaacgattgatcaactataaagctaaaagtatttttaacgattgaaattgatgccgtgtttgtagtacctaatgctttttgggtatctggatttatttctaggtcctgttttcttttcccacttcttcttcttcttcctctttttaaattttttttagtttgttgtttatttttattattttttatagaagcaatgtattgttgctgctcatcagatggttcaatattgatctcaatttgattacgattcctgttttgaattcctaaatcctgttttaagtcattaatattgtcttctaaccgtacatatctttcaaaaatatgttcgaagagagtatctttgttcaattgaaaaaattgcaatgatgacatctagcagacttgaatttattctatattaggcttagacatctgcatgtacacatgtacacaaaaaaaaaagattattcacagttaaaagtcttttcttgtataactgaatataaataactaaatagatagaaataagaatgtttaagcatccaaatccaaactattgttgatatcgttgatatgtcggacttccctcattgcacttcttaaaatggaagtaaagagacatcccataataaaaggatcaaacataagtatatggaaaatataagtgttgaaaacacgaagatgatgaatttaaaagtgaaataaatcttttaacttttttttttttttgagtattgttttatacaaacatttcaaaggaacagttatagcagtgtaagaaaacgtactaaaccgatgtttatcgctagtttaggaatgttccaattgcttctttaactattcatttactaaccttttcttgttgctcttgtttctaatcctatatatattatctacagtgctacaatagttgtactatagagagttcataataggaatataatagctctactgttgaatatgtgttataggtacctacgattataattagtattgcatataatataatcagtctaacggttttaaagaaaaaacactaattaagttattcattaattttgaatatatcatataataaaaaaatctatcaatataaaatagcaaaacgacagtacaaaaaaaaataaaaagagatatgttgatattacataaattagatattattggcaaagaattattccatttgattcagcccattctttaattgtttgctcctctatacgatctacaaatgggtttatcagattaaaattctcaattacttcggttattggaattgcttgaaatgtataaaacttctcaagaattgaagaaggaaactgcttagccaataatgacaaatacttaaatatatcatctttggacgtttggtcttgggatgtaatatccaaaacaccttgtgattgtagtacttgcgatgctaattttaatgattcaatcatttctgcttttttgcgagatgtctttaatcctatctgatggatattaagtctaatatctttaactgattgactttcccatagttcagattgtatatccttatggacttcaaacaagtctatctcatgtgtctttaaagaactttttattggagatataattaaggctggtggtgtttttcttttagttcttgattccaatgtcacaatcatatcattctccggcgtagttatcatacctccgttattttcctcttcaccataagaatcatatactatatggtcagtctcattcatgcgtacaacatttttaattttaaaataatcctgtgtttcaattaaattgtttaattgctctttatgtatttttaatattatatctggaacatattcactatatttagctttttctatttcttgaatatcattaaaagtcgttgttctggtagcggggacttggacttgttgctcaattagtaattccttagtagtacttgattcagatgggatagatttaattggagatactaattcactagtcaccttgaatgatccttgagtcaaatttatcattgaattcttcttctcaggggaaattggatcaaatggtaataaaggaatagaacctaaacctgaagtagttttaatcttcaaaatttctgacgcattctgtgaagaataatatattctttgttttttaaatttggtttcatcttctatatgtattctatttattgtttcttcttcttcttccatgctatcatatattactatatgatctttgttattagttagtctatctgcaggattatgtcccattcttctattatcatttattattattttcgcattgttttcctccatgaagtctttttcgatgctttctttatttagcttataatcggtatcttttatagaattatcagaatcaattattaaaggttgatttttcctataacttgttacaacatttccttccaagatttcacagtcactattaagtaaatttatatcttcttttttttcatcggtattgttatctgtatcgttgagttgattaatatctgttacactagtattttccattacttgtgataaagaaagaagtttaagtttttcatcattattgccctgtgttgggaagtgtgaatcttgacttatttttggagatatatataaagattgttgtgatgcactccacatatcaacggagtttcgttccatattttcttcaatttgcgattcactatcaccatatgcataattaaatatttcatttatatcctcattagtattttcagggaatttttctaagagaagttgttttaaaacagtccattcttcttcgttataaatatcgtaaacaattttcttgtttttctttgtagaagtttttgatttggcttttgttttttcattatgatttttaagaatatctctcactttcttattctttcctgatagcatctccattaaatgagatcttcgagaaggttgtgaactagtttttcttatttttttatcttgctttaagtgtgggtttgtattactgtttagtttttttaggataagtggtgatcccataagttgagattcctcttgggtatacttgaattgattaagctgagattttatttccatttctttgttggcttcatccagtctactctgtatttgtgtgtttaaaaatatttggttggaataattattgttattattatcactaatattatctttgttgtcattatcataatttttcaatgttttattcttagtagattcactaacaccaagagtattgctgttaggttcattttctctgttaatatttacttccatattatcctccattatcacagttcgagatatctctttgttctctgtaatctcttgagatatggtagtgatggggtgtttaatatctgtatcagaggatatcaaatcaaaatcaggcacttgtgtatcattaaacgattttataggactagaatcaaatctgtctgggttgtcattttcactaaataatgaattatctgggttcccatctaccaacaaaagattcaaatttcgttgtgcgcgtctaaaatccatcacgtcatttacaacatctatttatatataaagtatatatatgtagtatctgtgttagcaggggctgctgatttcccttaatagaatctctcttttttacagaaagtatctttaaataacgtgtaaacaatgcttctgcaattagatgtggcatgtatctttcttcttttagccttgttaaacagtgataattaactttttgatttttcttttgtttctgaaaaaggtttaaaagactgggttttataaatttttcttctataaaactttttgacttctagatatcaaaatatatagaaaaatagataactattaatgttattgaactctgattgaggatcagataaagattcaacttaaataagttgcacatttcctctacatagatatataataatatattatatatttatcaatcaattagaacgtagagtgactttcatatcatttcagtatctaatctttgaattctattagcatctataatatcttctgaagatattattcttagtcctattaagtcaccccagaatacagatattttatcactacaatattttaagtaatcaaatgtatcaatattaacgccttccatctctttgtcttcttcaatctcttcttgttcacttttcttatttaatcctgtttcaaattcatcgttattattattatcttggatatctattggatccacagtaatcacatatttctcaccattaataccttcgaattgattctttaaagattgtttatctttttgtaattcaccactttgtataatcgaccaaatagaccagaataattgcactgttcctctccatttaattacatcgttgtagaagaacctaacttcatcatctaattcctttgtagcctttcttttatttacactggatgaacttttcaaatgcgatacataagaataaaggaaatttaataactgttcctttgttggaaacaatgaagaattacaactccaaggttttgtagagctatagtcatgcatccattcactgaaatggttggctaaatcgtatgatgctggattggggccagaatattcgaaatctatcacaaccaattttttatcttgaatttgatcttgttttggtgggttaataattgtatctaaagagacgtttgatgtagatgggaataaggaatccgtggaaataggtgttaaatctgagggggtccatgattgtgtatcatgcttattgtaatttttatctttgtctatataaatagataaatctgcattagagagagaatttagatctattagaggagaattaaatagaagattaccatattgtgtatcattatgacaaaaaacaagtgaatttttaggagaattcttaaataaccaatttttatatttataaatatttcttttcaaagaaacataatcttgacaattgaaaatatcctgtattctttttttgtcatctatccagttgggatgtttttcaattatatctatccatttttcaatcttgttccaactcactggtccgttctcgaattcagactttaatagaggaatcccattatgtagttccttcattcttcttgctattcgttgagaaatcttccaatctcttatatcatctttagttaaagttgttgcgttctctaaaaattgttcgaatctaccattctcaaagcatccatataatgaagggccgatattttggacagataatcttgcaagaatctgtaattcattatctctatcgatgattgagtcgttatttttcccatagattcttaataataaggatggtaatccttgatattggattttaaagatagcattggtcattgcaccggatattttatttaatattaatttagatctacttagtggagattccaagtaacccttgcggtaccacttaggtattcttagagtctgaataatatttaatatgtcgtcttttaaatagtcttcgggtagacttggatctaagtaagctttaacaaaggggacttctatcacatcgaaaatattttgtgaatttgatacataagtgttatttttatcttgatccccattatatattttcaaactggttaaattgggtaaactgtttttgttggtattatcattattataattattattacttattgaaagaggctccgaatcagcatcaatatcattacccttatttctatttatattatcgttgacaataaattctatatcatcgctatctgcgctattgtaagagtgatcatctttatatgaaagtgtattatctaagtttatgcctatttttttgatcaacctttgacttgatctttttttcgttaatgaaggtcttcttgaatgtttatcattacttgtatttatatttggattcccaattgtaccagtagcagttgttgttgtggtaattgtggtagggtttgtagtgtttgtggaagcattagatatattagaacatgaatgagatccataaagttttttattgctattgttggttaccattatgttcttactccagtatacatttactttattgatactttttctttattttttttttttgtaatctcaattgataataaaactcaacatatagattacatgcagatatttcaaatgatatgtgtggtagatactttgctagtcttttcctcactgttgtccatttggcctgttcattgaaccaacctgtttgtgtctctctctatctttctctaccgtttatgtcaaatcaacaaaacccttcgagttctcccgctaacaaaaacaaaaacaaaaaacaaaaaaaaaaagaaaataaaaagaaacatgatcaacaaaccctaaaagagccctaaaaaaccccgacaacaagaaattttattatctccccgcaatatggcttatttccgtcttttgtccgtctcaaatggttgaaaactaatgatgataaatctaaaacagataaaatataagtgtttgtgtttatgtatctatgtgactagctcttatagacagggaggtaagaaaatataacaaagagttaagatatggttagatttgtgttaatgatatgttctttgcggagagaaagaaaaatcctagatcattaaacaacattattatatatgtataatattatatgttgttgttattgttgctattctattcttttgtagtacataaatggatttgctgggaggttattcaagtgaaagtgaatgtgagactgaaaccgagattgaagaggataagatatcacaacaatttgatacaagtttaataaacagaaaattattagataaatatcatattaaaccaactacaagtctcaaaaggaccagatctgggcatttgatgaagacaagattttggacaagctttatctatattgattggagattaacttcaaaagatagacaaattttatccaaatatttgaattattataataatcaatatggaaaatatggaattgaatttagaccgttgttttatagtgatttggggacccctttgaatttacatgtttcattatccccgaacttgaaatttagtactgagtttgagagagataagttctttgacaatttaaagaagaatttgacactaaagatgtctaaatcatttactatatcgttggaaagacatcctgtattaatgaacacgccaggttctttagctacatttctgacgttgcctatagactcaaatacacttcttaattatattaaaccattgttcaatgaaattgcaactttatggaattctagggataatattgcgggatcacctcaaccagagctttttttgactgaatcattcattaacaaagcacatgtttcggttgctaaaacgtggtctaaaatcccacagaacgcaaggtcgttgcttctaccacctttagatactcctttaattattccagaagatcatagagttcaatatgataaagatagagaatccctcactctgaatatttctttttcctaattgggtaagagtgtaaatattggatcatgttccttttcctctttagtacattttttcatttttttttttttattctttgatttgaaaaggatctttttgtagaggctatgtttgtttttgttaaaggagtttgtatattctcggaagtcatccaaataacagtgggatatagttaagtgtggaacaactttgtcaattgtttgattaagaattatttggagaaagattttatttttttgtttgttttatgttttttaccttctctaaattgtgccaatttctgactactacggtgaacgattaaagagatcattatcgtacaaggttgtatagatatagatagataactacataaataagcttaagtcagattatatatctttatagttgttgtctttttttttttcacaaactttaatactaataaagtcgagaggtgttacaataattcattgagtctttgttttttgtttattgcatttctgtggagtcatggaacaggtaatagactcatggggactcgcccccaataagttgttaaaaccaagtgatagtttatatataaataagtataataataatcataataataaagggacagctttgtatacaccagaaagtcaatcaaatgcgttcatgaattctaatgctaataataacactattattgataaaattaatgatactaatagtgtcgacagcaatgctaatgttacagctaataacaattgtattattaccactaccaataatgttgccactgatgatttatttgatatgaactattacgacatcgataattttttgactcaagaattaagagatttagatattccaatattacctaatacacaagattcgtcgatatctaatggtgatgatcaattgttaaactggaatagttattcaaattgtcagaataataatgataatagtaattacggtataattgaggatactggcaataatatttatacgaataaatcacaaaatatgccttcccataagagagggttaagtggtactgctatttttgggtttacaaatcataataaaaccctaagtatatcaagtttacaaagatctggtttagagaatattcctatttctattaatactgataacaaaaatagaaattcccctaatgttcttaaccaatttgatgaaaaggattcaaatattactaatgatctaattgaacaggaagatgaagttagtaaattaatctttagacaacaacaggaactgagacaggcattagagaaacaaaaattggttaatcagaagttacaagaacaactaagagcaaatcaattgcaacaagaaaggttgcaaagagctttagaagagcaagctaattgtacgtctccagtattgagaaacaacaaaaatcatcaaactaataataatgcatcaccttcaccacaaagaagttataggacacctgctaagatgacaacagaagatgaattgattgtaacaagtaactcagctgatggcaaatatcaattcccacctccttcaatgttatctcctgcattgtcaaacacttcattgacaggttctccaataaaaagatctcataatagaacaaggaatccggttttctccttatcaaattctttaatggcttcgtcgttatctccaaataaatgtaaaaataatttatcaaattttgatgataagataaatgatctattccaagatatgaatgatgaagcgaataaaaaaacagtcattgaaccattgaattcaccattcttcaatttgacatcaccatcttttagatcacaaaagcatctaaaaaaggaatcagtgacttccacagtttctactatcccattatccgcttgtgatagcgatattgaaacaggaaatggtcaagaattgctaggtttaggtattactcttgcagatgatcaaaatgacaaagataataaatatagtagtagtaatgataataatatagtaaaaacaaagattattaataaaacacgtcagcttcccgcaaaagtagaaataatgccaactattcctgcatcctctgaaaatacaccgatgaagcaatctctatcacaaaataaagaagctggtacttcaataaatgattcaagaggggacattcctcagaaacacatatttcaacatactccaatcaaacaaaaaccagaaatggtcgttattaatgacactgctacaccagtattgcagccacctttaaatttcgcaaatatatcgccatctaatagcatatttcaaagaacaactctatcacctagttacatgggcgaaagaactatagtattaggtagtcctcagatgcctccaccagtggaaacacttatgggtccaataaaaattacgaggaaactatcgactttacctagaggttgtatagatcaatatgtgaaagagctacctgataaacaatatttatgtctttatccaggttgtggcaaacattttaaaaggcgttataacattagaacacacattcaaacacatttggaagatcgaccttatgtatgtgattaccctggctgtgatagagcgtttgtaagaaatcatgatttgataaggcacaagaaacttcatttaaataaatcttttagttgtccatgtggtaagaaatttgccgatggagatttattgaaacaacaccaatcattgatgctttgtcagaatatcaagaaatatgataacttcatggtgattaagaaaactgcaacatcatctccaacacgaaattctacagtctccacttctgaatcacctgcaaagaagcatagggatagttcggagagtccagttaaacgtagcgtggaaacagataacacaggctatgttcaaaacaagttggaagaacagttatctttaaaatatattcagcaatatacaccaagggataataaatcacctattgagagtccatctacaccatcaagttatgataatttgcataagtaaataagtgtttgattttattctttgttaacgctataaacatttaaacacaacaaaaaactagtcatttctattttacactatatcattacattttaagcacttcttttacaacaaatacatacatataaataattacttatatatgtaaaataggacacttcttttcttaaaaaaaattcgtgattaaactaacattgcagagtaatgggcttttttatttgggtgttcatagtgtgtgctgatcagaaatacgtttgattttggtcaccaataaattactgaaattgcacagtcgaatgtcgaaagtcaagtttccctacattatggtcaaattacgttgcctttacatacttaagaaaacaatagcaattcggcaatgctattgttgtttgaaaaaaaacaataacaagatttctcgagcttccgaacaacaaataaccttgaaggtatcaaggtaatcttctaaaatcaaagctcctcgaggaaatggaatcaagaaaacaaatagagctagtttcttcgacgagaaagaattgttaagattagttgatttacttttgtcgtctcgaaaagccaagaattattttaacaaatctgtttttatttttttttttgattatagatcgttaaaaagtatacttatatgcttatatagagtcaagccgaatatggccataggaagaaaaaaggctactattaaccgttaacatgtcttcgtcattacattccttactgcctagagacgggtctaccgattcaccgcctctatgttctacttctaatagttataatggtcataatggattgagaattctttctatatttattatacttatatcgtctgcactcggggcctttttcccaattctctcatctcgatattcttttattaggttgccagattggtgtttctttataggtaaattctttgggtccggtgttattattgcaactgcatttattcatttgttacaaccagctagcgaagctttaggagatgattgtttaggaggtacgtttgtcgaatatccatgggcctttgggatatgtttaatgtcattatttgcactatttttaactgaaattatttcacattattttgtctcaaactcatttggtgataatcatgaacacggttctgggcattcacattctcatacacattcacatgattcagatcatgataatataaaagaaacttgtcatcttcattctgatggattttttgatgatgagttgaaagatgaggaaggagatatatcatctcatatcgattctgaactgtcgacaagtaatatccaagatatgtatatcaaggagtttaaattaaggaatgatttagaagatagtccacagaattcaaacatagtgtccaatagcaacatattaaagccatctccattaagtaaaaatcgttattcatatgaaataacacatcaagatttctctaagataagtataccagtagaagaaaaaaataaagaagaatatttgaatcaaattgttgcagtgactattttagaagcaggtgttttgtttcattctgtttttgttggtttgtcattatcagtctcaggtgaagaattcgaaactttatttattgttttgacatttcatcaaatgtttgaaggtttagggttaggtactcgtatagcagaaacaaactggcctcattccaaacgcgctactccttggttgatggcgttagccttttctcttacatgtcctatcgcagtcgcaattggtattggtgtgagaaattcgtgggttccaggttctagaagagcactaatagcaaatggtgtctttgattctatatcatctggaattttgatatatactggtctagtagaattaatggcacatgagttcttatttactaatcaatttaaaggaccaggtggattaaaaagaatgttagcagcttatatagttatgagtcttggtgctggtctaatggcattactaggtaagtgggcataattgatctttttttattatttttatctatttatttatagcatttatttttgatttcacattttatacatttgttttattattcctttgcaatgattataatcatttttaatgacattgatattcataaattattatttttaacttaccaaagagattatttgcaactgattaatgaagaaaaaaatcacaaataaggttgttaatgtttctactagattacttgctaatatttatactgcatcagttatcaatattgtataatatacattaatgtatttatttatttatttagccaggtagttgattatttatttactagtttattatattgatatgctaacttagtgtttcaaagaccctcttcttggccattttcttttcttgaacacgttgatcatattcattaacaaattcgaaattatgctttaaattccattgctgtttaataaattttaagccagatatattaaagccaaggtcgttcacattagattgtaaatttgatctcaattcatcctttacgcgttttatttgtaatttcagttcttcattcctttgtgaaactaattcattatggttggatttaacgataaaaaataaatttttacatattaatgctaagtagttattgaacaatttcttatcttgaataacaatgtcaataaattttaaaaatttaagaacgtaagagaatggcatcactaataaagcgtcctctagttgtgaagccttaattttcatcaatgtatctaagatatactctactggtgttttcttaatagcaattaagatagcattcccttgtggttttattggcatttcaaaagatgtggtatttttctttttattccatattgctagatctctttcatagttttcttgtaactcaatttctttgataccaagatctagtgcttccattaatctttcaccagcctttaaggattccattgtttgcttatgaacgtctgaagattccatagtttcttcaccatcctttttgaaggcgtcatcaccattaccttcttctaaagatgtcaataaagtttcttcatattgttcttccatttctttttctttttcttcctctaaaaatacttgatcttctgtctcttcccatactctaatactatgatcatgagatgaagatactacaaacgatgcatcagaagcaactgcaatggcccaaacttcactttgatgagcagctaatttctgaatacactcgaatttatcaccatcccagtatttgactaatccgtccttagaacaactaaaaaaattgtgagattcaggaagaaatttaacatttataatagagtcttgatgggcaaataaagatttatggcaatcaccaaaatcaagcccccagattttgatatttttatctgcagaagatgtgataactaatttagagtcatatgaaatatcaattgaaaggacaggcaatttgtgaccatataaacttaagaaaaatttcattgaatctaaataaaatactttcacagtattgtctaataaagaaatggccaagaacttatcttctggtgatatcttgatacttaaaatgtcatcattcaattctaatgtagtatcatgatatagggtcaactttgtgtcaaatttatcttcagtacctggtataatacttttttctaattggaagtcccagaatttaacagttttatctgcagaaccggtgactaatcttttaccatcactggtgatatctaatgaccaaatagctgcgttatgtgcatctgtcaaattttggagttgagttgatgaggctaaatcaaacaattgtaattcaccatctcttgtaccaaggataactaataacccaccaggtaaaaatttacaagtcaaggcataaccacattcaaaagttcttatacataaatgtgttttaatattccaaatttttaaaaggccattacttgcagtggctaataacttattatcatcactaatatctaaagcacgaatatcagttcttagaccttgcaaatctattgtatataatttgttaggggaaggttgtgtaggttctcttctttcatatggtatagaataatactcaatggtatttgcagaggtagttattgcaatttctagtttgtttgatgtggcaatagtccaagtagtggatttaactttatatggggatcttatcatctggaatggatgcataacgatagatacatgagaatctttaatattttgcgctatttcttcatcagtcatacctttttccctcaatcttttttctctttttttcaaagctttagatatttctccatctcttctgattctaaatacttcaacagtcttatcagcgttttgaataaagaaaaatttgacaccatcactggttgtcacaaaatcaacattaagaccgcgattcttactttgtttttcgtatatgcccttttcaaccaatttagaaccattttcattattcaaattcaattcccatatcttaatttgagtatcggcactagtggtcactacaaaatcgttctcgacgccaagggaccaacattcaccagtatgggcaatatgggtttctatacattgttgaactttcatatcccatattttgattagtccatcctttgaagtacttattaaccaattttcatcttgatatgaaagaccggtgattgcatccttatgtgatcttaatttgaaaagaccgacttcactgaccaaatcccagactataatatcggaatctttagaaccagatataagtctagtaccagttggatcaaactttagaatagatatacctgatgtatgaccattaaaattcagtagaactgtttttgacactagatcccagattttgatgacaccatcagagtaacctgcagctaaaagatttgtttcagaatgaaatttcaagtaggtgacttcagcaggtttagaacctctagcatcaatagagcctggtggaagaccatcagataatgtacagactagttcaccggtcttgatatcccatatgttaatattttctaaacaactggtaatgatttggcctggattgttattatggtgatgacccttttgtcttgtagaggaggatggaagccaaactgagttggagttagaacttatcacaccgaacacagatgcttgttcaaatctttggtatgactttaccatgttttatgattggggaattttaaagataaagaaaaatgaaaagacgaagaagaagaagatagattctagagtggactatctcctaaaacctgatttaactttataattcttctttggtatcaaatctgcgttaattaatcaaaatataaagagtaaaaacaaacctaattgagatattaaaacaaatatatacaagtatacagatagatataatacatgaacaatataacctctttgaactcaattaatatttttccatgtttaactgtttgaagaaatgctcatcgattttctcttcttttttttgtttttctttttttctctttgtttttcttttctagaaatcttttgaagtcacgtgcaacaaaagttagggttatagacaaagccctaatgacaaaccctaattgtaatcggtgatatatatccgctaaaaatcctgagttgaataaacaacaaacactcaaatcgttcaatttattccttctatatatatatatatatatatatatatctatgtgtgtgcatatgtgtgtattggtggttactgggatgatcatatctttgaatgatcttttaagtactcgtagaactcatctataatatagggccatgcagcagtctcgttataatctgaagccagctcttggaaattgctatatttttggaagaattgtaggatcattttccaacaatcaaatgttataaaagtcttttttgtatcttttaagaattggaaccacatacaacatatctcttcgtttacgtttatgggtattttatgtcttgttgtcactaaaaattgtctccaatactcagttgctgtagtcatatccaattgtgtagagtctacatctaggagcaaattaaaggtgtaattatagatctctacaaaatacatcggatcatggtaaaacttatggtttaaatcaaataataatagtctcatatcttttaaagttgaacacccctgaataaaccaagagttacaaaactgttcatagtcgagtgaatcgttcatattcttccatgataagagtttagctaggatcacaatagagatatcattattagcatcctcagtttcagtttcaggtctatttatattcaacttctcctcagtgctaatattggtggtggtattattgtggttatcgctattttgctgggatatctctaactcttctataaacttgatcataccttcaaaagtgatccattttgttccatctggacacacttgatctgaatatctattaaataaatctgttaaatctgctgggtatattttgtcttgattatttggttcattaacaaaactattcaattctttatcataataatcatttaatgcatagttaatgttccaattattctctgtaagatatttcttagctatctcatttctacaatgggttaattccaaaaaacttttaattaaatcatcttcttccattcttttatgtcaatctaaagatatatatatatatgtctgtaagtatttttatacgtgtatggctgtgtttttgtttctttattattatatttgttattgtttctttagttgaacattgttatgttgattttttaattaatgcacattttataaatccattcaagttttgttgtgaaatgtacaagatatacccatacttctatagataaggatactacattgatacacacatacgcattcatatacatgtactaaaatcatctttgctgcattaaatggtggtagctcttcattaatatatacgcagatatatatatataatctgatgatctctgtggatgtacttttagggcagttgggggatttacaactagaagatgatttaaatattgtattgcaatggttattaccaaaagaacatcagtgccatccaccctcattaagagtcaaggattcaataaaaaaaattgtacagttctctaatagacaatttaataatggttttaaattgtattattacgatatagttagaggtcaatatttcacatttctaaatgctcatataaattcgattacgtatactcaattatacaaattagagtcagagttttattatcccttgcaatttataattatcttaaatgatgtaaactctatggaagattcgttagataatgtcatattttctattagacattattttattgacactaacaagcaatttagaaatcatttaactagtgaaattaaatatttaatctataaagaagattttaatctttgtcaggagttaattaagtggattgaagagagtaacagtgataattttaatgcaaaggggttggtacttgacataatgttgaaagaaatcgaaaataattgtcataggttgatgaggggtatttggaatgatattaatattgttaagtgttgttatgataaatttatgaacgctgtatggccaggttttattaagttattacaaacaccagacagtgtttcgagtaacaacaccaataataataataggaatactaatattactgatgataaagatatattaggattaatctataatcattttgagaagcaatttattgatattagattggatgaaatttttgaattgatcacaaattgttcaaacactggacctactctatatgaattgagagacactatctctagatataatggtttaatagatgagtttgtgatcaaatttttaggtcaattccaaaagtttataaatgatgaatccaggagcacaactgaaattttggcaacatttattatgagtatagatgttttcatatatttaaatattcgtgaccattatttgagagttttgaccactttcattaagcccatcttagcctcaagaaatgatttgatagagatttacttatattcaattttgaatcttaacaataaagaattttgtctttttaatattattaaacctgaagggtttgaaaaattgatatatgttttaaaaggtgatcatttgttatcgtttacttccgtatcttccgacattggaccattacatataaggaataggcatatctctttttcttctccctctactaccactgtcactaccactacttctacttctttgtcatttgcttctaataataagcaggatggaatgataatatttgatttgttacgacaatatcaagcatgggtgcctgatgggatatctatggatccaggtaaagatatgaatatgcttaaacagaacaataatataaacaaggctgtgagcacgaataaaaatatcatgaaaaatgcagtaatttatggtagaagtaatttaataacagattgtttgctttcaataatcgatgataaagataaattaattacgattttattgaatattattacattaaaattattaaagacccccaatagaaaattaggtagaaaatatttagtcgcatatcatcttatatataaaagaattcgatatggtcataatttaattacatttaacgatattattgtaagtttagataagcacactagtgagactaataatgccaatatttcaaatgaaaataattcaacacaaaatgttgatgatatcgatagtgaactaatcataaatgatggacaaataaaaagatataatgatagaataagatatgttacggccattgatgaagaagaagagatatttgtcaaattcaataagattaatgttatgttaggggatatgaaagagagtgataggttggagaaacatataatgcaaggtgatgtcagaatatatcctaaatttgtgacatcatattattggaatttaaagaaaataaatcacagagatcataacagtgatgctgaaaatagaatgaagatcaataatcaattagaagacaagcttctttcatatacaaaaggttataatttcttaagaccaggaagggtaattaaatattgtaaagatgatacaatcgtttctataacattatgtgattctaatacacatacagagactaagcatgatgttacaatgagtcaatattcaataattgaaaaatttgataacaatatatcaaaaattaaaatagatgacctatctagacaatgtgggatgacagactcagagttgcttaatgcagcacagtactggatagaaaagggtattttaagatacaaagatggtattttttgcgcatgtgatatgacaacataaaatgtaatatagagcaagaaagaagtgttatttttaaaatttagcataatgtcatggggagacgtatataacattgtattactcctctgcttctacaaccaaagctaataacagaagaagctaaatagaagaattggttttctcatatagtatatcatatttgcataagagtatatatatattgatataaattaacttaagttttttttttttgataagaaaaaaaattaatgattagtaatcagtagtcattgaaagagatagaatataaaaagagttcactttaaattgtcatatattgctagaatcatggttgaattcataaaaaatgtttagttggttgagtttctttagaagaatattctggtataaacaatcaattttttatgtattcttatagtcattgaaggaatagccaatagataaaaaatcaaaaataagtatgacaaagagtaggaagaagatcgctgtatttcatacagatcatgcagctgaatggacccatccatatggaacattcgatcaaatgacaatcaagttgttagatgagactgtaccatatacgttatcaagggaggatgtaacatacaaggtttttgatatatataacggcgatattccaaccagtgagaaattaaatagtgacgaatatatgggtatatttatcactggatcaaggtacgattcattttcagaggatacagattggattattagattaagagagcttttggttgaattgttattaactgatgagggtaacgataaaagtaaagatatgagtgttaatgccccacctattgttggtatatgttttgggcatcaagtgattgcacatgcattgggtggtagagtagatagaaatcctttgggttatgaaggaggtgttgttccaattgatttgaatgagattggtgtcaaattgtttggccaaaaccagattaatctttcaatggtacataacgacgcggtcttagagttacctaaacatgacccatctattgtcaactggggaagtacaaaacgttgttcaatccaggggttctataaaccagggcgtttattgacatttcaaggacaccctgaatttgtctcagaggtagctaaacgtggctgggaaaagaatttatccaatccaaattcaaagtttagtgagaaacaagtcgaggaaatggaaagatttacatcatcattagagaatcatggatatactgtagctgcagaggctatttggaagttatttatcaacgaaatataacagagcaaagcggagagtaacttacaaatataactatatatacatatattaatgttgagtaacgtttttatctttcattttcattagtatttacagcattcgtagaaattgtatcgagcactaatatatggttctcctgagggaactttctatgacataatcttatgtgatcttgtgagtttttgaatatttgtacatagatatatcactgtatctggaattcttacaaaaattgatatagttaatttttttttttggattataaagagaaataaaagcaatacagaaagaaactatcaactttacattactaatacatatatattttaatagagatatataaataggtagggagagagttacaagtgacaagtgtttctcattagtgacaacaaccattattttaaggtcttttataagaagtaactaatgtcagaaaatgcgaataacacacagcctggtgaaggtagtggtgattcacaaccaaataggacgaatttaaacaacgacactaccaataacaataaccctacaactacaagtggaaacaatattactgtttctattgaatatatgtatgagacaccaaatatccctgcaacgcagaataataatagtaacaacaacaaccttaatagaaataatagtagtactagtagtgatagtaataataatggtaatcctactgctgcaggatctgcagactcgagtaatgcacattcacaaccaggaacaactacatcacaacaatcacaaccacaacagcagacacctccagcaggtatgagaccatttcctgcaggtgtggtctttttacagttcagagatatcccagcaggtaatactcaagaaaggttacaaactatcatgaatattgcatccgagattgcagttcgtagaatagttgatttatctagtgtaagatataatagaggcatcacaaaagaaaaatttgagtctcttccagtggttccgattaaagatttggatcccactgtaaaagaggatggttgtagtatatgttatgaaccatttgttgatcctataccggatagtaattctgacgagaataagaaacgtagcagagaagatgatgatgaaaaaaaggaatctagaaataacagaaagaacaaaagattaagaagtgactcatctgatagcaacaacaataataatgataatgataatgataatacaatacctactaataatttatctactaacattggggatgttacttttaatggaacatcggtagaaaatactaatatcaatgccggtaacaatagtactcaaacaacaaatgatgaagaagtcaaccctacttatgatcattttgctgtgaaagcaccttgtgggcatatttttggtagagaatgtttatataaatggtgtaagtctgagaatacatgtccactttgtaggcaagttattgcagagagtatgaacacacctattatggttaattcagcacaagctgcagctactactaatgctgcatttcagagaattcatgatctcttgtacaatacaaataataataataataataattctacagagagtaataatggtaatttttcagtgataacaaatactgctaatagtgataccacaacaccttcaatttctaaccagggatcaacagttgctacatctgcgactgctacacctgctactactacacctgttacaactgcatctactgtgaacataccatttaggacaagtaacattgttttcataactccccaatggtatataccaccaaatactacatcaaacaatgcaactgtaactgcaactgcaagaactggaaataatggtactactacaagtaataatgacactagtagttcagaaaataatgatacccagactacaaatgatacagttgataataactcgaatcaaagtgaaaggccatccccatatgaacgtttcagagctattattggatcgtattttgatggtctaatcaatcagaacaacaatagtaacagtaataccaatatcacagattcatcagcatcttcttcaaataattcaacagttaatagtaatagtacaactaatgccaactctaccttttctacagccccaagtaatgtgcaaaatgcaaccagaaatttagatttattggccatgggaaatagtattagaaatgtattgttgcaacaaagaaacgtcttatcaggtacacataataatggtgatgctccaacattgttcaattctggtgtagcaagttacagaacaccatcaggaaatgtttcaacatatcatcttggtgcacatgaagtatttcatgcctccactaacgataataacaatagcagtgcagcaacttccacatctacagataaccaaaacggtgaaaataatgataatactaataatagtagtagtggtgataacagtagttcaggaagcaatgagcaagaagaaaacaattcaaataatggccacactcatacttctacatcttagttgaaaacggtttatagaaaggagtatatgagatcaaaaactaaaaaaaatagaaataaaaataaactgtagtaattagtaacatcattatagatttattcttaaacttgtaataacatgatagttgattatttttcctatagctttttttatagtttaaggatattacaaaaaaggtttttttttctttatatataaacatttgtatagataggatattgataatactcagcatttattacaaactaaaatttataatcattagacacctataaacgtacatatatatgtgtatattttaaaattgatataaatgtatttcaacattattactattattgatatatgataaaaggagttaaggatatgcatagaatgaggaaagagggagaattagaaatggagatagagaggtaaggattacctgactagtttgaggctgatattcaactctttaaagtgccttgttgttcccaagtggctaattgttcccttgagtaatgataccgttttcttttatctttatattgttctagaagatcgtctagttggttcagatcagttatggaaaaaattctctgctttaaagtagcagactgggcatttatatcacttaattttcttttcaattgaactttaaagacattttcactatattcttgtttaaataaagtatccaggttttgccatttggtggaatattgttcgtataatactcttaaagaattaatttctttatttaaatttattttatttgtttccagttgagaatatttatcttgcaatgaaagtaattcatcctttcgaagttcagtttgtttgataattgaatcaatattatctgtttgatatagttttgcatattgtgataactctttcttatggttattgatcaaatcatgcaaatcattattcgatagtaaagtggtattctctggtaacggtacattcatttttttgttcagtacagtgtctctctaagtgttaacaaattatgacttgttagatgctgtatataaatatatatatatatatatatagctttttattctccctctgcttgactgttagtttttgatatggagttccgtccttaaccaaagagatatttctatatatatatttttcacagggtagatccaattagttgtgatccgaagaatttagcaataaataaacattcaaggttagtaaagagagaatataccttaaagaatgaataagaagatacatccactagttaaatagcaggacagatttttgtaagaaatgaacacagataaataaatagagttttctacagatgaaccaattagtgaagttagcagcatcaaagcaaccagctacccatgcattaatctttttacatgggttaggtgattctggtagtggatggtctttcctgggacaacagttacaatccatggatccaaaggctttccaatctaccacatttctgtttcctacagcctccattgtgaatattacagctaacggaggttatccaatgaatgcatggtttgatataatggaatgggatccacaaatgaaacaatttgataatgaaggatatttaaagacattgaatggggtcgtaaaacaatatattaaacaggttatggacgaaggtattccttcagagaacattatccttggggggttctctcaaggtgctgctatcacattgggttctgcaataaatttagaatggaaacttggggggtttatctctttatctggcttcatatcatgtaataaagatatatttaaaaacaaagaggctgatagattggttaataatgagacgcctatatttcatggacatggggaattagacccgatagtggcattatccctagggaagcgatcagtggattggatggtgggtgtttatggattccaaagggcagaatttcattcttatcaaggtttgcaacattctgcaaatgagcaagaattgtatgaattatatcaattcataaagaaatgttggaacttttgattagagatgaattatttctattttttttttactatttacatatgtataactatatgtaatattatgctatctaataccataattttgatattgttatttgactactgatatttgagatttaagatatggatttataactccaatatcaatgctaaattcaaataaatgaaaaaaaaagtaggttatatgccaaattatgtctgtatccttaatcagtcagtgaattacattggatcaggtcaatgatgaactgaattcatatctctctttctctctctttagttttcctttatgtatttgttcatcgtcccacaaaacgaacaagaggatgggaaaaaagatagaatacaactgagaaacctgtaatgtaagtctagcaaatcgataattctgtaagcatatacagatgtagtttttaaatagataaagaggcagagaaatagacagatatgaatatatatcgtttgtgaaagagagaagagtgaacagacatttttgattgtgatagatatattctgagtaaatataaattctgcaaatttttctggttggatatctagaatatggactctcttatcgaggaaaagaaacctcccattactgatatagagatcttaaatgaagcctttgctcgtaagaaacctgttaaaatatctacaaaagttgacgttatagatttagaagagttaaaggactatcaattaaggaagagaacagaatatgaatcatatttgaaaagaaatcggttagatataggtcaatggatacgatatgctctctttgaaattgaacaacatgatatgagaagagcaaggtccatctttgaaagagctttgctcgtcgatatctcacatgttccgttatggattagatatattgactgtgaattaaaatacagatatgttaatcatgctaggaatcttttggagagagcagtgtcaaccctgccaagagttgataagttatggtacaaatatttatttgtagaagaatccttagagaattggaatattgttcgatctctctataatagatgggtctctttagaaccaaattttaatgcatgggattcttatattgattttgagatcagacagaatcaaatgaataatgttagaaatatatattcaagatatgttaatgtttttccagagactacgcaggtttggtttaaatggttaaaatttgaatctatatacggatctaatagtacaattcggaaggtttattcaattgcagtagatactttgatatcacatgaggaaactctatcgaatatcccagattttcaagagaatttaatcgagttgatcatatcgtttgctaattgggaagcatctatacaagaaactgagcgtgctaaagcaatatttagtcttgctatcgaaaaatggcctaataatacaactttaaataaatcatacttagacttgaagaaaaggtatggcgatagtcaaacgattgatgaaggtgtcttaatgaaaaggaaatcacactacgagaaattgttgtctgaaagaaaaaaagattatgatacatggtggatatatttagattttattgaagaaaatttcccttctcagatgttagttagtttagaaaaagctacagatctgaataataaacctccattaaatctaacccagagcaaagttaacatttcgtggcaaagatatctgtatttatggataaggcgtttaatttatattgaattaaaatcaaatgatattagtcgatgccgagaattgtatagtaaagttattgaagagattataataccatcaaaattgagttataataaaatttggttaatgttcgcacaatttgaaattaggcaggagaatatagatttagcaagaaaaatacttggacgatgtattggcatatcaccaaatgaggaattatttcaagaatatataaacattgaaattaaactaaaagagtttgatagagtgagaaaattgtatgaaaaatttattgaatttaatccaatggatatgtccacttggtttgcatatattcaattggaagagaatttgggtgatgaagatagggttagaggtatatttagaattatgttgaataacgaagtaatgaatttaggactaggtgttaggaaaataattatggaaaaatttataacatttgaaacagatgtggaagaatataacaatggtaaatctctttatagagaatttttagaaattactaattattctctagaaacatggatatcatatgcaatgtatgtatgttcggtaccaacagacgaccagttaatcgctatgtcagaggcaaatcaggatttagatgaggataatgaaataatgtttgaaccagatgaagttaattttgataaaggtagagaggtctatgaggaagccttgatgtattttaaaaataagaatgattccaaaaatagatttgagttgttaaaggctttacaagaatttgaaaagagatttggtactgatgagacacaagacagggtttctaaaaggctgcctaaattagaaagaaaacgatttttacaaaatggggttgagttggagaagatcaattatatatttcctgaggataatgaattatcagttgagtcagaaaataattcttctaaattcttagctttggttaagaaatggaaacaagaccaaaacaaataattatataagttcgatatagaacattttataaatatttggatcaaatatactattgttcgtggatactatatttcgatgaaccttaatttaagaaagtaaggtcagacagtacatatcttatatatgtaatcataggcctggtggacctgctaaacgtggtggtaaatgagagttttcaggtggagtatctgatgccaatccaggtggtaatgaagatgttgacatatcaatacttggatcagacaaacctgggggtaatgatggattatgtaaagagggttcatttaagcctggaggaacagatatttcaccaccattattattttctggttgtgtaatagattttctatttgcttctaaaccaggaataggaggagtaaacatcgatatccctggtggagtcatagaagtttcaaaactatctaacccaggggctacatttattgttgatatatgattttttgctgattcttttgcatcaaggaaagcattggaatttatatttgttgaattattccgtagcaatgtattcttgttatatctattgttatgataattattatcatagtttacgtcattaaaactttgtatatgttgttggggctgaatagtcctttggtaccttgattgatatcttctagtaacattgtttgcatattttccgtcaccataccttgaattatcttgattgttattagtattatatgaattggaatactttgattgataagcagaattctgataccttgaagatgatgttccctgtaagtgtttaaaattagatccagttgcagtaatattgttattaggagaggtagtagtggtaattgttgcaggttggaatcgattctgcgttttacttataaaggaatcattgttactagtattttgaggaacctgggtttgacaatctctcgtaatatgaccaggttggccacacttatgacagataattctaaatgcaacagattctctttccggacagtcatatttcttatgaccttttaaaccacaaatagtacatggtgatgtgtcttccctaagagtcccattcaattcggctaaatctctcagttggtttctttttaaatcgttttgtccctcaggagaagttacagcttttatcacaacaccttgacaacattttatacccttaattactttgtcctctgaatcagcaattacaagacaatgaagaggatcttccatgttcattgcaccttctggtaaatcactagcacttttaccctcttttactgaaccacgacctctgatagcgattttacatttagattctaattgtaatcttttcaaagtgttaccacgaggaccaagtaataacccaacaaaattaatctcaggatattgatcgactggaatataatatttttcctcaaatgtggaaggtttaacatatccctctggatgtgtataaaatggaatcattctccatgcaatctctactaatctatatctttccatctctaatttttttctatatatctgttcctttgtattagttcttctaccttgagcatcatattttggtggtggtgattgggacctgagtagatattcgggaggtttaaggtgttccttattgagtaaactagtaatctctttaattctatacatagcttggtatgcacacatttgttctaatgtaagtggtccagtaatattaattggtaatttttcaccttttttctgtatcttagtaggtttcccaccattccaaagtgaacggttaacttttaaagacttcttagattcagtacggccacgttcttctatgtctggcattgcaatatatctaaattattattactcaaataaaaaagtagtatgtgcaattttttatttatatatatatggtttttccctgcaccagttggtttaaaatttgttctagttattcttctctattgaattataactaacaataattttaaatcatctagaatataaacgttggtatgcaaatatgtgtatcaatctgtgtgtttcagtgtatctgttggatcaatctttgaaattttctgtagacatctgaaaaaatttattgtaatcttctttccaaaatctaataatctttaatggcataaaaaaacttaaatatatacacagacagacagttaaagcagctactataacacagaggcaagatttgtattggtatcaacgaagggtgaaagaacaaataatagaagtgataatagaatgggtgtttgtagtttgtttgaatcatttataacaatgaatcaattgtatccttattatagctgttgtttatatgattacagtgaaagaatgaatatatctaactgtaagatatgtatgtatatatatataaaaagataggaaacagctttcttatcctatattttggctaacatttcagtaaccatagatttaactgtgtcaaacagttctgatggggaaccatctataacggtttcaccatcatttatctttctaacagctacttcattgtcaacaactaacataccttctcctttgaattccgcagaatggtcttgttctgttaacttacgttttaattcagctagacgaacatccccaacagacaatgtgcctgttggatgcaaaacagaaggtttgtctaatgcttttaatattagtttttctcttgaatggtagtgttcattcgcatgatctttgggtttttctttcactaaacgtcccactacttgagcaattgtatggtcattaccaatcttttgccagtttaataattgatctagttccatatcaatggaaatatctaaagttttgatcttggtatctataacaattttatcgctaaatcttgttttcataacatcaatgttctttttatttaggttatttataatagtctcgttttgggcttctggtggtcctaatagaattatttttcttgatttcaataatggccaaataacagcagcagatctttggtctacaatgttctctaaactaaaagggatcaaattcacatttagtgttatagtttttgtttcacaaactctttttgatgggttatttaatgcatccaaatagtctatattatcaaagttttcatttgaatcttcattatagttgatatccttagatggtcgacctctttttgttctctttattgggatatcagtaataatatactcatcttcatcttcttcgtcttcatcaatattataatattcatttccactcttatttttattcctaccaccaaggttagtatgttttcttttggttcctcttaatatgtttttatctttgcttgaagtattggagtcctctatttcatcattttcaaattcggtatctctctcctccttgggtataaatttagtgaaatcaacaattgtaccataatcatcaggtttttctctttttggattaaatgggaacattttatactttgatttcccggttgtgtgcatatctacaggtatttcgtaattcagattattaatatttgctctattcttcattaaaaatatgtcgtcgtcgtcatcttctccgtcatcatcttcttcattattacgtccttcattattacttattccatttatattaaaatcattgctcctaattccattcatattatttttatttccattattcatttgaaaactgtcagtacctttcttcagttcctgtcttaattggttttcttttcttttatttgtttcccttctttctattatttttgttttaaagtcctccagttctttatccttcaaatattcattcttccagaccgtcaaggcaatagagtctttaaattgaatagtattaccatctttaaaatttgagtcatttttaattgaaacattccatctctcataaaatttagacaacaagctatctgggttagaatttatcttgcttatggcttctgttaatattatatttaaattatcagaattattaagtttatctataactttgtttactaaagtatccacatttgacaccaaacagatcttaggaccttggaatttatttaattcttcaatctttattacatggaaacaattacccataatgaatggagatttgttgtctttagctccccaattctttaataatgacgctgttaaccattctaacatagattttgcatatgttagatttcttccacggctatatgaaataaacaatacaggaatgtttaatgattgacctaatttattactgttatatattaattcatggataattacaaataattctagaaatctactagtaatttctaccggaataatgatagtattatttatcgatttttttgttatcaattgcttaataagatctttgaattctctgttacgtcttttaaatggtttagatacaccaaacttatcaaaagtggttatgattgcagatggtctcattaatgctgatataggttttccactattatccagtaagttcgctccatttagaagtgtacccttagtatggttccatctttttgcgtatattattttttcttcatatgtagaaatacaccaaagtgatccaccaggtgttgatccagaattgaatgcagtcaaagttaatccatcaaacttaaactttaaatccacaatttgagagtatcttaaacttttaataaaatcgaaggctttttcaatgtcatccaaatccatttcattggtagtgaatggtcccacaatacctctatttacataataatcgattgtagagacacggcctaaatttgaaatcggcaaagttgcatacacgtcaattcttgagatgaaatgcgacagaaaattgtaaaataataaggcgtaggcacccagggattcgattgttggttcagacaaaatgatcaaatcaattgtggggatcacttcagaccaataactgactgctgctttataagatattttgtctgcaacccaactgggatcaattaaaattgtcacattttcaaattgaagtacagttccgaccagagttccagaaccgtcatcacaacataaatatttgaatgtcatcctattagcaccaactagatttttagagtaaaacaaagaataataaatgcctttggagtttttaactagtgattacaaagggatcggttaattaatagctacgactgagcaaatatgccgtttttgcttgtttgcgtgtatgtttgtttatggtggctttgtttcagattcaacgatatctttaataaccaaaattgaagattttttcaaataagttaaactcgctgaggtcaaaaaaaatactaagtgacggtaaagttaagtaaagataatgaaggatgtctcttcaaaaataacaacaagtggataatctataagatattagcatgtcttagagattttctttgttgttgacattgattgttcttattttattagttgctaactaccggaagatattatatgattgcaacaccagagacaatataaatgaatagatatggaatcaataatatttggtgtttgtttggttgactttcatcataaaagaggtccagaagtagaatattggtatggtttaccagacggcgttcaagcagatcgattatggacagatttaccatttcaagcccttccggatggctcacattcttttgaagaaacgttcacatacttcaccttactttataataaacaagataaatctagttatccaaatgatgtaactaaaatatcagagagtgaaatggagaattatacgacattgtatggaatatcgtgttcacaacagattaaatctgatgaacttttgattaaagatgagagtgtaactagatcgactgttcaaaaagcaattgtggtgatatcttttaaaccaattctaagtcaaattaaagagaagttaagtattgttaccaatgtattcttcatgcagcatgattttacagacaagaaaataataaatacattatatgatagtctcatatcgatatatagtcccattagttataaatacttgtcacaagacaacgataatagtcaaacttatatgggcatacatttacaaaatttattattgacatacaaaaaaaatttattggttttgttaaaggcattgctattggaaagaaaaattattgtttatgggaaccatgttgaaaatatttgtaatttacaatttggtttaataagtctaatacctgatttaatatttaacttggatgattccattagtccacagttatatgataagaaaggcctggagaatgggcaagtagttgactcttttaaatctagtgataaaaaatctgtttataagtttcttgggttacctttacgaatatttgagaaaggtggattgttttcaccttacacaccactacaacaaattggtaacattaaaagtgataagacaaaatttttcatgattggaacgtcaaattctttattatacgaacaaagagaccaattatgtgaagtttttgttaatatggatgaaaacactattgagattctcaataaagatttgcaaccattattaagtctttcacatcatgataagaaatggattgattcacttgtggatattgttaattcagtagagacttctaacaacattagttcggataatttagacgaaaaatctacaaagataacaaatatatcatatgaaggtagtgatgatttccttcgaagtcaatttgaagaatatttgtttggtttattaagcagtgtaaaattatatgaatatctgaagttacatgatggtaatgaaatggcaatggctacaattccagaagatatgattaaaaatagaccaataaatacatttaatattaattgggtaaaatcatggttgactacacaaaatttccgcattttcaatgctataacagatgatcgtatttttgatttattcccgccaagacatgtttacaatggtgttgatccatttactatatttcaacaaaggtttctaaatactttacaaaatttgaaaaaaagtacggctagtcgaagtaaggagagtattaatagtgacgcaaagaatctagataaaaataacgataaggaaaatgttgataatgataacagtataaataaagtttctaatgaagatgaagcaaatagtatatcaagaacagcgtctggatctcagtcaatcttaaattcatcaatggtatctaacagtcagttgcaaccaccaacaaataatatatggagccaatggaaagagtattttaaaaaggataagaaagagcaacaccaacaaacagaacaatctacaagagatgatgaccaattaaccacttcaaaaaatgaatttctcaaagaaaaggaagaagatatgtctcatgttaccaaggagattagtttaaataataatttatctcacaaaagtacaagaaatgtttttgaaaatgctttattgggacttggaatttatgtcaataaaaatcaaaatgaagatagtagcgacgagacggtatctggtctatctatttctcataataatagtggtgaggaattaaatgttgattcgaccgttgttttagataaagggaactagctcataggtacgtagctacataagagattaatagttttttatttttttgtttattccgaaaatcatttgatatgaaattattgactgtataaaatattggtttatgttgtaagtatagactaaaaaatttaggaagattttgttttttagtaagtatattattgtgatattttattaacagagccataaatgaacttaatgattaataatagaatacagatttttcagtatcattatcaaatttgtttgaaaagtttggttgcagtttttttttttcgatttttgtagagagtaaatatttttaagttatataagattgatagagtattataaagtagttgttaacgggtatatcaaacccatgtttattaccgtaatattaattctcttagttatttttttgtagtggctataactaaaaaaattatggatacaattatttgcaattacaatatataatagttcaacggataaaaagatcaaaacaaaaaatttacgcaagttgaaaaaacatacattattgtaattaaaaatatttggaaactatgtatgtaattagaccatatgagttataagatatctcgtaactctaataaaagggtttttttatagaacttcatttggttgaatagcaacaaaaatgcttaaaaaaaatagttatatgtgtataggtttaaaataagattgtcaagttattttgattctgtttttcattatccactgttaattaaatatgggtttatttttatcattaatgatattagtaaatggactatcttaaacttatttttcttgagatattgatcctgacttttctttttaattcccgttatatcttattgtacatattatatagatcgtgtatgaaagggaagttatgaaagatgaattttcttcttaaagttattgttcttctatatataattgttggaaaatgagagtttgttactgtcatttccataagaattatttttaattagttttttctgtatattatgtggtgtacggatgtaccataatatcaggaagacattttatttttcaccaaatatgtttttcacagctttgaagaaaaatgaaaaacttaaaagaaaacttgaagtaaatataaaaatgtatactgtacacactatataataagtatatacatgtagttagtacacaataaaacaagcatctataacttaacgatgtctaccattaccatggacgctgagggctccaaattccaataatacttttttattgccctaattttccgttcggcagttcaattatataggttagttgtataatccaaacaacagcacatggtgttataatttggacttagaaccaattcttttaataggactattggacgaatagtaagggcaataacaaatatataagaacgttatatatataagagaattaaaggattattgcttgttctttttcgtattatacaatatgttacatataattataaatcaattaaacatacaaatttagatatcaagatgatggtcctttatatatgaatcatgggttgatagtttcttatttggggttctgtaacgattgtcaccgtaaacacatctctcattaattaactcattgatgtttcatgaatgtttcattttgttacttagtattcaacaatcacatgggatttatcaacaaatcctaagtcctataaatccagactagaactttttcttgacaaccattacaaataccctaacaatatttttcaaccctaatccttttttttatttaatcataatatcaaggttggtctacaacacatggtgttatagaatagaatagttattaccatcaagattatataagattttggcaaatctagaatttatctattgttttaataagtcccacgtgtattactaattaccatgattagagaattggggtgcagttctaatccactagtgcacctaaattaatgtaataaattttagggtttgaatcagtcagatcattaatgtaccaatctgaataatcgatcgagctccagaaaacatataaaagaacaacgttttctggagataaaagatcatcttccataaccgtttcttgtaaataatttatatattatatataaacataaatagaacaacaagcaagtaacaagtcaggtaacttcgaataattatattagctcgatataagccgctcaatatataagactgttttagtaagtatagtatcgcctatagttgattactgtctcgattatttgaataactattaatattatttgcgcttccctggaatacacaaagaatctgataatttaatactacaacgcatggtgttataatttggacttagaaccaattcttttaataggactattgaacgaatagtaagggcaataacaaatatataagaacgttatacataggagaattaaggattattgcttgtttttctatttatgtttttatacaatatatagattatttacaaaaaacggttatggaagatgatcttttatttccagaaaatgttgtctttttatgtgttttttggagctcgatcaattattcagattagtacattaatgatctgactgattcaaaccctaaaatttattacattaatctaggtgcactagtagattagaactgcaccccaattctctaatcatggtaattattattctattctaagacaatagcaagatacttgttcctcgtggcccaatggtcacggcgtctggctacgaaccagaagactccaggttcgagtcctggcggggaagtattgttttttatttttgctgtaatatccctgatattactgtttagggtttgtttagaaagatgagggttgatgatatttttctaaactttcctttttgcaaaattttacaaacacacataaaaacaggagtaaccaacataagtacaagagagcaaccaagaagaaggaacaaggaaccaaggactacctaggtttagatatagtatataagtgtatactattaggttatcttagattagggatatagatatatagatatataggaatattacagctagagatatagaaagagtctatatcttatatctatccaagtgaaatattattgagatttcaacaagattaactgttatcagaaacacataacctctgggttattacatttgtgacttttttattattgtcatttgatacgaactgttagtttaaaaagatattctttctgttcacttggattatgacactttgtacaaacaaaattcactaatggattcgaaaggatattatgcatccatttttggcaccgcaagagatggttggttgattagtaggtgtagaagatttttgaatgatcatgtagtgaaaaacatttttatttttgatgtttttaggaagaagaaaatatataaacgataacaaatatttttacctcataggattacattttgataatgctttctctttggacaaaagattttacagtatacttttgaaagatagaataggaaaaatacattaagatcttagactctgtttctgtacttattgaaaattttcctgtatataaaaactagttatattatcaccaagccttggaataattttatttttctagagaaaataactcaatacgtaacttatataaacaaaagtagaatattatcttgtgtcacaatagaaaaataacttttagttgagttaaaattatagaattatgttaaagtgcaaatatatttatactgtttttaagatctctttcacatgaaatgaaagagaggttatatataagttcttgaaatattaggttttattatattcgataaacagtgactatatagttaacaggttctcaaagtatttctaatagttagattcttaatgcaaaacatccaaaaaaatattcttagaaataaaaggttgtagtataactaaaagagccatgtgaaaaatatagtttttagatttttggaaaaaattttatgtataatatggtttatactgtgaaatattgaaagaaaacaatatagtcctaataaaatgtccttatttatggatattgttgagaatgggcgccttttttcattggatatatagtaaacattctcaatattatattaaacagatttagtatataaaattataataaagttcttcactttctttctctatatacaacatagaaataataatatacaaagattgtaaataagataaaaacaatgtatgatgaaatccttggctttatatatgttaacattaagccattttcctctacgaacagtaagatatttaataaacaaactcaacaacctttggtgacctctcaacaattattactcaacaatttattgtttagtgtctgctaatatcttattgttctatctatttcattatagaacattttatttcaacagatatgtgtgacaaaagatcattcaacatataatcacaaatagataaattattttaattcggttaaaagtttttttttttatagaataattccattgcttaagatagatcaaatgttttaggatcgttaatttgtttatttattgtatgttcttttggcaaattaaaaaaaaaataaaattttttcctttaatcttttggaaaaaaaagagagattcacacaataaatattaaatattaataaagcataaattagattaagttcaacttttgatatctgtgagataaataacatagaaattcctgtttattgcagattttgaatccattttgaaaaacgtatcgtatattttcttactaaaatccagatattattactctaatataaaattatttatattatttcttatataatgctaattacatataaaaggaagagttaataataggagaaaaactatggaatagaaagagtgtcaataatggttttgtgaattctagaaaaaattctacaatgtagaaatactgttaacaatagaattatagaaattcattaacaaaatgtgtcgcttgatcagcatagttagatagtattgtattatcagtactattgttattgttctgtgggaccagattattgtaagcattattactattactattactattaccattcccactaccattattattagcacttactacatttgtattatcattaacattaacaccattattgttattgctattattgttgttgctattattattattgttattattattattgttgttattatttacatagtcttgtaattgtgctcttgcttgtgcttgtgcttcagcagcagcagcagttgcagcaatcacttggtcatcgaatgttgcatttgtatcaatctgaccatcagtaccgtctattttatggaaatccaaaatttctgaatacatcattattctccaggtttctactggcaaatctgcgtcgttgaaatgccaatcaaatttagcttcagccactggttcatctgttggatcatggtacggtgccaaataaggatgtgccaaagcttgagctgcagttattcttttccttgggtcgaatactagcatcaaagacaataaatccacggcatctggttctacatttttgaatctttcactgaaaggtactggatcacgatgtggtagagatgtgacgaacttcaaagtattttcggaacatattgtattaatgacatcctctggtggagaacctagtaagtctgttataatagagaactgatgaacatggtctttgcctgggaataacggttttccctcgatcatttctgagaagatgcaaccagccgaccagatatctacttcagtgtcatatttttgccaagtcaacatgatttctggagctctataatatctcgtggacacatagcctgtcatttgtggatcttggattcttgccagaccaaaatcacagatctttagatcgcaattttcattaatgaggatatttgagggttttagatctctatggatgacacctgcagaatgaacatatttcaagccccttaagatttggtataagaagtattgtacaaattgtttttccaatggtcttgtttgtagcaattgatgcaagtctgtgccttgtagttctgtaacaaaatagatatcttccaagggggacaaaaagatgtcttgtaaacaaatcaagttttcgtgtcttaaatgttttaacagtttgagttctctataagttcttttagctagcactgctgttgaaaagggtttcataatttttttaatggccacaggttggtttgtaagagtgtcagttgcggaacaaaccaacccaaaggcacccatacctactggatttaaatctatatatctgttggtaatctcgaaaacagtaccgaaaatctgtgttcttacaaattcctcgttagcagacatgttttaaaatggaaaatatatatatatatacaaaaatatcgacaacaatggtaacgacaacagtaactataatgataatgagaataataatagaaaaagagaactaaaatgaaataaaaaaaaaaaaaagaataaacaaaagcaaaatatagtttttatttatcttcagaaatagatgtttgatggagacggaagggaataggggtatctataacaatcttaatctgtgaatatttatattacaattaatatttaatagtagcagggtgataaataataaaaaaaaacagtggttctagggagttgaggaggttaatatgaatgtatataattgtactaaatagcaagtaaataatgactaaaattatatacgtgtacagtagacataagaaggattgaaaaatgtttataatattgttctacttcaaattcttatttttatttttatttttttcttttcctagtttaagttttcttgtagatagcaaccgttatcatactgaagggcgagaaaaacaaaagagaagccaggataaaaaaaaaagaaaaataaaaaaagaaaataaagaaataaagaaatacaaaaaaatataaggaaaaaaaaaaaattagaacgactaagaaaagaaaaatggtagcggacgaagcggcgggagaagtaaagaaatctttggtggaatcgatttattttttttttttaaagaaagagaaaaaaaagaaaagaaaaaggacaaaggattacgtaaaaaaaaggcaataaaaaaaaactttgttcagttatgcgacggaattatttccgcattaaaaagccgctacatatcactaagacaagcagcttggaacagatattttttttcaatatcaataatattacttacccaaatatatttaagtaaatagagcgtatcatatatatatgtatatgttttacaagcaaagtttaacaagaattatttatattgtcataataaaacaaaaaaaaagagataatgtccacatataatgtagatgaagaaaaaagcatagaactattaaaacattaaaatacttactttgtctgttaaatcaaaattagaaacggctttttttttttttattattgatcaatactgaaatgaaaacattcaaaaacaaaagcaaagaaggaaaaaaaaagaaaagagaaaacccatgaatattcaccacaatacgaggattaattttagacattccaaatataacaattaaggcaagcactaacaaagagaacactctttggaagaaaaaaaatcaaaaacagaaataatatcgcgtgtttaattgtctaaaacgagctcgttcgatattacttttaagagcgtactgtatctttgcatgtatatatatatatatataaatttctttctttgatagtcataaccattaactgaattaataaattcatcaggtaaaaaaaaggtagaagcaaatgcatttgtacaatgaatgattaactccgttagacacttaaagtgtcaaaatacaaacacgaaaccataaattacgttatttgaacacaaaaaaagcgaacaaataaacaaacaacaataataaaacaagaaaaaagaaaaaagaaaaaagaaaaaagaaagagagatgcgcgtcaattgcatttcgtggactgttacgaattgtattttcttttcttttcatttttatttcttctacaccatttttaaaagtgttattcaaaagtttacaaataaaataaccaaaagaaacaaaaaaaagaagcagaagtcgaatttgacgaaatctatctagattatctagaggtcaatgggcaactttcacaaaagaaataaaatagagtttgaaacttctccatctttctctctgccttctcgaacttacaagaacaaaaaaataaaataaaataattaaaaaaagcaagcataaacaatttaacgcagggtttattccaaattaggcaaatggcgtgtttttttttgttttgtttttttgtggtaatattagctaacataatactaaagatcaatgtgaaaaaaaaaaaaaaataaaaaataaaaaagaatatgaaaacaaaacattcgagatattacgtttgactatcaccgagttaaagaaattaaactaaactgacaacaaccgctaaatttccttttcacctctgttccactttgttaattttgtttatttggtgggattgcatgcatacaagaggagaagaaggagagggaaattcctgttagaaaagcagaaagaaaaaacagggacatgttttgttttgttttgtttttttgtatgtggagatcgcttgacaagaaaaataaaaaaaaaagaactagggcctagaaactcacaaattaaaggggagaaaagaaagcaggcatagcacgagcacaagaaaaatccgggctaagcaaaaatgttttacattcctccaacttccacagtgatttggagttagggttttgtaaaagacatcttggaacgtgtccattaacatgaattttagacatatacgtatatattcattattctgtaaatttataaatctacgagatgttcatttataaaaatacttgttttctaacttactactccaatattgtcttactaaagtctagttagtattagcaactgagtgaaaagaaaagaaaagaaaagaaaaatagaaagcattttactaatcattaaatgtaaacatttacaatgatactataattcaatactatctatatatttatctatagaataaatacattgttttctgttcaactaactattgttagggtctaatcaagaaaaaaaaagttagatatgcgttacaggacggtagggttgtaacattttttttttttgcaaaaagacaccacgaatggtgatgcaattttgcaaaattctgttccacacgtgtttttttttgcctcctccttccattttaggaaaataaacaattttgagtgtttttttgttttttttttttttttttttttttttttttttttcatttcttcaccaagtaaaactttttacaacaatttttttttgattttttattttttttttctttgtgataaacaaatatatatatatatatatatatatatatatatgcgtgtggttcttattcctcgatctttagttcctgatctctagttacatttcttctacaaaattttcaactttttgccgaaagaaatcaagaaattaatcttcgatccactcgcttattaacttttgcaactctattttattttttatttgccccttcctaacaaactattgaaagaaagaacaaaaatgcaattttccaccgtcgctactgttgctgctgtcgctgccgttgctaacgctcaatacaactccactgttacctctactgctactgaaaacttaactactttagttactatcacctcctgtgaagaccacatctgtaaggaaaccgtctctccagctttagtctctactgctaccgttactgttgacaacgttgttactcaatacaccacctggtgtccactttctgccgctgccaacactactgttgctacttcttctgctcacatttccaagaacgctacctctgccgcttctactaagcacagtgtttcctcttaccacggtgctggtgctaaggccttaccagctgctggtgctttattagctggtgctgctgctttcttattataaatctaagatgaacaagagcttatgataatagcaataataatagaaaatagaataaaagaaatataaaaaaagggacttacacaaataaatagataaatgaacattattatttaatcatatttaattacattaataataatttcttttttcttttttgaatttatattccattatttttaatattattttaaatatattatacgtatgttgtatctatcagtctattagtttttctttttttttttgttttcataaagtataatttacatatctattcttgaataaaagatgtagaaaaagaaggaacatccatcttcttcttatcctagcttgtttttcttctgcatttgtttttctaggaataattaaagtttatcaagaaaactgaacaacaaaaaaaagaatattcaaaagtatattcatacttatattatttcattaaaaaagaaggaggtgtcatacacataatcgtgtacatacatatatatatatatatatatatatatatatatttctattcatctaaatatttaatttattacactttataaatgagataaaacttgttcaacagaagaaacagtgacatcagaagctgggtttgcttccttggcagcataagtcaccttaccatcttcaataataatggtccatctgccagaccagtaaacaccttcaccaactttgaattcataacctaacgatttgattaatttaccagctggatcagtagcaaatttaatatgtgtggtatcgttgacccctaatgatttagcccatgcttgattggcaaatggattgtcaacagttagaacgacaacctgatctacatgtttatcttctactaactcattcaagtatgtaatgtaacctggaatatgagagatggaacatgtaggagagaaggctgctggggcaccagtaatcactacagtcttgttttcagcaatgaacttatcccagttgactgtttctggtaatttacaagctccttgttcagaatcttttggagacaatgcaatatattggaaggacaaaccttgggtgttcaatggttggtttaaaattggagcagacatttttatttatatttatatctatatttatatttttttttttctaaactaatgttagaattgctgtactatattgttgttattgttgttgttgttttttgacatgtaaatgtaagtgtttaaatatttacttacggtgaagaaaaaaaccaactaaacaaacaaggggtcattatctttccccctttctctttatatatcattttattttaataattcgtcgatgaagaactattgtataaaataaatcaccttataaaggatattcccatatccagtaaggaatctagaaaaaaaatattgaagaaaaaaaaagggatgataaattttgggtgtggagagttgctggtaacaattacatcatattagagtacaataaaaaaatataaaattgttttaagctgattaataagtcaagtaagaaacaaaaataaaaaagagtttggcaattatcttcctgtgatttaattactaattacataatactacaactaccgcaaacagtagaaatagtattaataatgaatttcccacagctatcctttaatttagtgtacactttttaggcttatttacaagagtttgcacgctagtgactatcaattcttttttttcctgtcatattattatgtttaaaggcgtatttgtaatataatagcattacgactgatcagatctttaataattcttttgtttgtgcggtgataatttgattcccggttgcctttattttgttagtgtgtttcgaaaatttatattgtctttttcagtttattcaattagtaatcattctactaggaacattacatactctcaaagaacttgttctagactgggaaaataaaattttctaactgggtttaagaaattcaatagttagggttgttagtatacccaattgaaaagaaaaaataagatatagggtttttgtttccatgacaactacctttttttacatgaatttattgttatattttaggtttcattttttctttctttttttttttatttttttatttttttatttttttatttttttaaaaaagattgattactaataaaaaaaggatacatttgatttgtaatccagacattgtttgattttctttatctttttgtattgttgtctatcactaaaaatggcttacaaaccaagacaaaaaccttcgatacgtcgttgtatattatactaactaaattcctatatatagatataaaacagaagtgaacataatgatgttagcacttaatagcttgcgacctacaatcaatatattttctcttgatctaactttcttcctttttttcctcattatgtaacttctaataaataactgctctggcacctataataaacgctaaaactattaataataaataaataaaacttttttgtgaactacttaactgtttcatccatataagtattctaaagctggtttatatatctttgtttttatttttttcgttttataaagtaatagatccttcttcattcattaaatatattcattcatgttaaaagttcatgtgggtaaagaagattttaatgtttctaaaagtttattccaaaaatataacccggatttattcaaaactaatgatgataacataacattagattgtgacttagagatttttaaattaatccatgattttatacaagacaaggatatatcctacaaaattaattcctatagtatctggtacgaccttaagcaattactcatccagtaccaactagattctttatttaaacaactagttgaaagtttaccttattacatggttcaaatcggctataaagattttaaaattaataaagatttactgcatattgataatggcctacaattcaattggatagaaaactcttttgtcccaaacttatcaagtattgtttttgaacaattatatgaacttttaattcaatctcggttttcatcagagattggtaatggttttgaaaatattattgatgtagctaatagagaatttctaattgaatactgtgaatattttaaattctttaaattaaaacatcaattgattaaacataagattatttcaaatccatatgatgataatctaccagaaattcatattaaattatcttccttacataaggatggcataactttaaaacatggttataatcaagtaaccaatgaatgcacagtagatcataacaaaaaaaaggctacttcatgtggaaattccaatttaagttcagaggatgaagttgatgatttacaaccacagaaaaagaaacaaaagacaaattgcaaggtgaagaaatcatgggatattatcaagtattctcgcccgtatcaaatagacacaacaccaaatgaattagtctttcagctagatggaaatgaaagttctttggtttttaataagtcatcaaaaagtatccatattgatatgattggcgaaacattaaaaaactttgaaaacaaattcaagaaggtcttccaaaatgaacaaatagatttgaataaatttaagtgtaaatataaaaaacaagttggcagtcgagaattggatcatttagttttacctgcgtgcatatcaatttgtgatctgacaattaattcagtaccatgcagaaatgttgcacaatttattactgaatacacgcagatagagagaattgttgatttttctaatatggatgaattgacattttcacacggatttgttttgaatttaaataaatcgatgtggaagtgtgggataaaagatggtaaaatcatgatgattgcaattaaagctgatgctttaactaatgtaaaagaatttaataaagccactcaatttatataatattacatatatatgtattatatgaagaatattctcttgttctttttcatcccaaatttatttatttgacacattgacaagttcgcggttcgaacctctgaactgtttagtttctttttaattccatttaaaattaatgtgagacacaaaaataaaaaaggagaaaccttctagttcgttgtaagaacatacgtacagaaacaattgagtattcatattcgttgtatcaactttcatttcgtttggttatgaataaaaaaaaacttataaatctctttgtaaaacggttcatccttatgcaggggaactgctgatcatctctgtattgtttcaaattgaccaaatgttccacagacgctaatccgggaactaaaggaagtgttttttcttccaatttaagtggtataattagtcacgtgcaaactattcattttcatttttttttttcaaaacaacccaaaaaaaggaagaagaatatcaaaatttaaaaaacaaaaccatttaccgaattataacatacataattgttggaaaatgagagtttgttactgtcatttccataagaattatttttaattagttttttctgtatattatgtggtgtacggatgtaccataatatcaggaagacattttatttttcaccaaatatgtttttcacagctttgaagaaaaatgaaaaacttaaaagaaaacttgaagtaaatataaaaatgtatactgtacacactatataataagtatatacatgtagttagtacacaataaaacaagcatctataacttaacgatgtctaccattaccatggacgctgagggctccaaattccaacaaaagccataaacctctctgtgtataattcataataattcagtttgtatatatatagatatattatattattatttggattttttggttatcctttcaaataaactaaaaattcttatattagtcatcaccagataataattaagtatgttttattatcatctaatttttctgtactttgaattatggcagcgatatgaagttgcataatgttaagaaaatgactttgtgataaaaattctaataaattccatcctttgagttaatatatgataatgtttaattatatacgcattgaacttagtttttgttggagtttagaacactcagtgtctatgataatggtaatcatcattaagttatagatgcttgctgttttctatataatgtataatttatatatatcataacaaatttaataaatagggcgtacggttggggtcttcatgcatgcacaaaaggaaaattatgttttattcttaactattttttttaatctgttccttttcttttctgatgttttgaattattatatatacttgttattattacacaataaaatatctatttgattaatgaattcgaatttattaaaaagtagcatagattttctggttgaacggtgtaacatttttctaattaaaagttgcttactatttgtgaaagaaagtatgaatacttagtggtgtggtctattgggtaattaatattgatataattgagtcatttatttgtttggtatttcattatgctaaaatattattatagcaaatcgattttaatatgattatcactagtattaaatttttgtctattacagaatttataaactatttacctctataattgaatgatagattgaaatgcaagagaaacttaacagaaagttagaataaacacaactctgtgaagatcacctaagtatttgaaccattaaaaatgaaaagaaaaacaatagcagaaaattctacacctgaagatgaaaatttttagtagatatataaaatatgttttatattgtcatactgtttcttctatttttaactattgcaatcttttgttcccactagctaaaataacacttaactcttagatctttcatttaataaagtaactcaaacaaacggtattctttctgaataggacgtttattaaatttcatttgaacaataataagcataaataattactatttctgactcatctcattcaactacctttttaaagtaaatctttgtaaccagtatgttttttgtagagaaaagaatatgataaaactattattactttgtataaaaataccttaaagttcataatttttacgcactttacatttagatttatcaaaatttcagtatttttataaaattttttataggtatttgctatagtgcattaactttctaacaaaactcaaagggatatttgatttaattttagagtagtttaatgtattgacataagaaagaatagttgaagatttcaaaggttttgtacgaaaaaaactgtattattttaatgtcaataatttcatggcatagttgtattacaaaatgtaggtcgtcaattattattaatatccataaggaatattttatatttttgttaatccataaactggtgataaacaaaaatctaggtagttattaaagtaaaaaggaaatatatttttttttaatagatgaggttctactgcaagaaacagacctttccaaagtatagaataaaactaaaatttcttggttgttattccttatacataatacataaaatctactgtatgtacgaaatagtgtaaatgtaaaatttacatgtaaaagaaaaaaaaggaattttgtgattaagtgaagagtttaaaaaattggatacactagtgtaatatagtccagtagacaagacaaaattgtacattgtagagaacctgaagtaatgattccattcgtaggcaaaaattttttttttgcaattgtaataacccaaagattatgtgtttctgataacagttaatcttgttgaaatctcaataatatttcacttggatagatataagatatagactctttctatatctctagctgtaatattcctatatatctatatatctatatccctaatctaagataacctaatagtatacacttatatactatatctaaacctaggtagtccttggttccttgttccttcttcttggttgctttcttgtacttatgttggttactcctgtttttatgtgtgtttgtaaaattttgcaaaaaggaaagtttagaaaaatatcgtcaaccctcatctttctaaacaaaccctaaacagtaatatcagggatattacagcaaaaataaaaaatgaaacggacaggaattgaacctgcaacccttcgattgcaatctttccgaattgtcccagaaactaactggagtcgaaagctctaccattgagccaccgcttcaccttcacaaagctgaaatactaattagaatattatactctaaaataaaaattatttgggtgtttaagcaatagtaattgtggttgtgtaatgaatactatcaagattttctattttgaagtttgtaaattggtgtttatcagaaaattcatgccaaactgcttaaaaaaatgaaaacaatactgagacacttaagtgtttgaattatgcatacacataaatgcatcattgaattcgttaaaaaatgagagtttggttcctgtcattcccatttgtattcttagtttagttttccatatattatgttgtgcacggatgtattatatgtggaaatcttgcatgttttactaaatttgttttttagagatttgcagaaacgaaaaactttaaaagaagagttgaaataaataaaaaaatttacactaaatagaatgtatataatagataaacatatatatctaagataagaaaaaaataagtatccataacttaatgatacctttctttgcaatggatgctgagtgctgcaaattttaacagaaattattatctttttatacctaaattataatatatcttatctataaaaagggtggtacatacatatttactagttattttagacaatattttttcctgttacttttattaaaatattgtaaagataggttggatacagcttatgatgattttaaaactattttttttgtaaaatagatcaatttgattagaaacttgtacaactattaaaaggataaaagatttattcagtttggtagaagtatcgatttcaaatctatttctgtcaactttaaaataagggtataaacaaaaacaaatcaaaattaaagaaggaaaaacatcattaattttagagaatatatatctagaaatacataaaaaatactaatatatagacatgagttggcagtttatttcaactattaaaatttttattagttaatacaataaggaatcataaaaaaaagtaaaaaaaagtaataggtccatgattatttagatgttgtgtaatataggttatttgcccaacattcttttatataatggtttatcatcattagccatggcttcaacatcataagactcgtctctcttagttggtggtacccatctgcttgatttccatggtaaaaccccttcttcccacataatgttaacatcttccaaagatagccctttagtttctggaacaaagaagaaaacataaacccaagcaaaacataagcaacccatgaagacataaccatagtagaagttgattgcaccagtgatgaatggagtgaagaaacctaataagaagttccagatccagttggcggcaatagataaggccatacctttagccttgactcttaatgggaatgattcagaaacaatgacataagcagttggggcccaagttgtagcaaaacagaaaataaagaaacaagtgaaaacaatcatacagttaccagcacctttagaggatggttgatctttaccatttggatataaactggtgacaccaactgatgcgaaaataacaaaacaacaaatcataccagcagcaccccacaataacccagttcttctaccaaatttatcaaccacatagaaagcagggaaagttgaagcaaagttcacaataccaataatgatagcagtttcatatgaatctggtaaaccaacagatgcaaaaatttgagtaccgtagtagaagaagtaattagcacctgttaattgttgtaaagtttggatcatgacacccataatagttctttgtaaaaccttacctttagtagaaaataattcaccccaggtggcatttcctacagctctttctgcttcgataccagcagctaagaattcgacttctgcaattacagtaggatcatcagcaggtaatttattagatctgcctacggagattctagcatcttccattctaccaacttcgattaagaaacgtggagattctgggacaaataacatagcagcaatcataaataaaccccaagcaaaacctaacccaagtggaattctccattgtctagagtccttataactgtgttccgtaccataattagcacaataaccaaggaagatacctaaggtgatcattaattgataacatgagaccaaagtacctctaagatgctttggagatacttcagagatcattaatggagagtatacagcaatcccaccaacacccacaccggaaataattctaccaataaagtattggtaccacttgtctgttgcagtgatagaaataactaacccaaccatataaacgatagtaacccaaactaatgcgagtcttctaccccatatgtcaccaattctagaccatgcaataccaccaatagcacaaccaatattgaaaatagaaacaattaaaccagttcttgcgtttgagaaatagtaggttccatcatcatgttgttgaccaaatcttttttggaaatcgatatgatttaagaaaccaccaattgtaccagtatcccaaccataaacgtaacctccaaaagcaatcattaaacacaaaattgatgaaacaatatatgcagaagcaggtttttttggcatttctgcttgtgtagtttcttgtttctcgaaattatctaaatcatttttgtcatacttgtttgaattttgggagagaatagaacgggatccactttcagtggaagttgaattttcatcctttatctgggacatttttagttaaaaaaaaaaaaaaaaagagagaatcaattattagtggcttgtttaatttattgtaattttgttcagtggtttttttttattatttataaattagattattatttagaggaaagagaataatcaaattgatttcaagtagcgacttgtgtcccctttatatcttatcaggtcgagggatcttccttctttatttttcgatttagtcaaaacaagtgaaggaacagatgccccactttttggacaagaagaatagaatcgtatatcaagtggtgtagcataataagcaacataacagaaaaggcaacaatttgtgaaggatactgtaaaggcaatcatagtacaatcgtagaataacgttataggcaaaggtattatgggcatttgattcttccttctctttccccgcattaattttttttttatgcttgaagaatgtgtctttagttgtgtttatgacgtctaaaatatttttagaatgaaagaagcagacacttaggtgcaagaataataggcaggttactgttgtaaattttagaaggcgttggtatgcggggcatttctacaatttctcgaactttgcaaggaatgtactatcatcagaagaaaaacaacctttctattgttttctctttttttttgtttttcaagtaaacagtagaagggttttaataaagtaacaattttttatggtcgtaaaatatcttcataatattaggtttaactgtttttaatattgaaaagttaaacaaaccacaaaattttccttttactccatttaggaaaataggtttgtctaaatattttttaaaaaataaaaaacaatcaataatcatactataggacatgagcccataaaattttattttgtagagttttcttttttgttttacttcttaaataggtgaaaaaaaagaggagcaagagaaaacctcgaacaatagaaaacaaacaaataactaaaaaaaaaaaataggcaaaatacaatagtgcctataataggaaaaattcccaagaactttcttttgtttttttttttcatcaacatgccgttacttcttttttatttctattatttggtcattatgttattagattgtcaatagaagaataaagacgtcaaaaattagtataaacttatagatgaaaaagcttttgaatgaagaggggtaacaggggtaatattatcatttattgtattaaagacaaagacagtagttgtcaaaaaatactaaaaaagtttccccacatgaattttcatcatataatttattttttaattctatttttgttttgaatgtttcttataagatacaataaaagttataaccatgacttgtaattttatcagaatctcgtttaaaaaaattatcacagccccacaattgatgacttggattcagtgttgtttaaaagtaggataggactttagggggggtatattcaaatgatcaaatgtaatctagttgtaaaaataataaaataaaaaaattataacgtgttatttttacatatgtaagaagaaaatggtatatgccaaactttttgtgctgttgatattatttatttatttttaaggagaacttttctttttttttatatgaaaagtagctggaagaaaatgggtatgataaaaataatttatcgaagagtatatatgatttaattatatatgtagcttacaaatctagacttttataccccagtcatttaaggtaaggacaaaatgtagctctaagtgttgtataccaacaagtgtatctttttttttcctcttcttctaaatcatatataatctgttgctatctaatttaaacaattaaatatggataatatcattacacataactgtcgactaagttaatagtgtaattctgaagttgaaattatttcaattaaaataaaaaaaatgtatagttggcgttgttaagaaagcaaaaaaatgtatttttttctcattgtattttctattgtaaaaggatataaaattactatttatttttatttgatttgatcttgcctgtaccctaattatattagcatttctctcattaaaagaataaaaaatgttattgtaaaagtcttaataactttttcataaagatttgacttctttatcatgtgcctatttaacaaaaagctattcttttttttttttttttttttttttgccattcgttttaagtctatcatgtttatttttgtccttctttcctctattattattattataatgtagttaaaatttcataccaccttttagaattaagatacatacagtttatcaagtatataattatattgttaagatatattgtgtttttagtagaagttatttttttgtgttgacgcaaggcttcggaatcaaaaattctagtagagttcattttaaactaatataataagataaggtaacttacaatagaatattggtggtattataagttttttttttttttataagttattccttggtccttttctttctatataagtaatatacaagatacaatattatacagtatactcattttatctttgaatcttctttactataaattttcataatttttaatcacttagtacgatgaatttagattatcaaacataactctaataattatatttcaacattttggatatcggtgagattctaagctttttatatttcatgaaaaaagttcgaagttagcaaggatactagtacttagcttaatcagtatgaaaataaacaagtttaagtaagaaacaaacattacaacaaatatttagaatctccaaacaacttacgaattcactaaaagctttgaaaaatttcccttgcttgacatttttattataactaccctcttctattcctatcatatttatagtgtttattaaacactctatattttttagtcttttcaaataatatattagttggcctgtataaaattctttctttacatatatatcagctttactacgagcaaaataaatcaaatgaacataatattgaaattcgatacgtatctaaggtagttgaacttttaaaatagaaagttcccaagtaatcagttaactttactagtttataatgctcatattctcatctatctagttcaatatttatcttctcaaagaagtaatagggcaaaataatcatatgtatatatatatatatatatactttttatgcgtacaccaataaaaaaattgtttcattcaatagcatgattaactatccttaagaaaaacctataataactttgtttccatttaaaattctcagttagcattgccttcttggaaaggaacatcttcctttgcattggtaatctttccacttccacactcttttccgacatcaactaaatgactcatttcacagttatttttgtctcatcttttgtcacaaaaacttacaaaaaaaaaataccctgtctttatcgatttctctatttatcttttttttttcttttatttttttctagaaggaaaaagtttaatcaattaggtttcgttaggtttaagagctacagattttcagaatgatagaaaatactgtagggtttaataaaattgttagttacattgtttatatactataaggtggtgacacgcttattttttaaatgatacatagataacaaccgaagaattgaggataatttttaatatcactaaaaaactgaaataatttaaatacaatttgtgaactttgaaagaagtcgttcgagcagagaagtactaactttttttcacttaatcaactttgttacgatgcttgtaataaaatttaaatttttttgattacatacaaataaagggtttgtaaaatgaaaagaaaagcaataattttcctttaatgaaaaacaaaaattttaatagaatagggtataaatcaaaattgaagaaattcgaaaaaaaaaaaattttttttttcagtcgtatttttttctttttggaaacctcagccgcattttatgacacatttgtttttctttcctttcttagaagtttgccgtttattttgcaatttaatacagatagagcataaaaaatgagtcagctttttttttctaatttcattcaagtgacataaaagtaattaacgctaaatttacatacacacacccgtatatgtatatatataaccatatatcttcacaacaaaatgcctttatctttttctcttttaactatccttactagcactttttatctctctttttgtcctcttgtttaccccattttaaaataacaaatcaataataatgacagccatgagatagaataacagccagtgtagaaagatgacagtaatcagtgaccttatttctctcccctataaatttttattatcacacaacatatcaaccaacaatcattattagtttttataatatttaaaaatgtgcgtttacaaaaattttctactatatttggacaagtcaaagttaaataaattatgcctggtaaagaaacgttaaaattaaaaaaagtagttttaagaaagttaattaaattgataaaaacaccattattgaaatatatggatgttttatccaatattttaaaaggtttggaaacattgtattttaatggcggtaagataagacaaatatatcctattaatattattgaaaagttcaagcatattttctatcatattaaaagatcgattatatattgttcaaatctaaatgagatcaacgtaatatacaatgaatttatcgaatttttgagtcaatttgattcgttcaatgatcaatcattactaatgtttttccaaccattaattgtcaaattcgattatttccgtgattttttccaatcttttagagtaattaacgatatctatgagaagtttcccagtgataccacccactggaatcttaaattacaaaaggaaattcaatggtacatcacatttcaagaagagttattaaaaaagctggtgtcagaaccaaaaatctctacaaatcaattccaaaaccactcaacaaatcataaacctaaatattatagacaaaatgtttatataaaagatgtataaaaaaaacaacaactaggtactcattaatacataaattaatgcaaaaaaataaatcgaagtagttgtgcatatgaactgtataatactctttaacaccatacggcatatctcctgacggagaaaaaacttttcaagaaaacacacatacccccctatctacctaccaatttttctaaataataagaatgaccccattctttaatcttaattagaaaaaaggtgatgataaattaaaaagaagcatcaagcaaacgaatatattgaatatcaaatccaatataagtggagacaatgttgccatcataaccactgtgttaaatgtgacagaaagcgacacttctaattataaaactaacaaaatatcagtgtattaaacagaataaagaaacaaaaaaaagcattagaaattcttaaaaaataaaatattccaccaaaagcttcagaccctctactcatgatcacacaataccctagaatgttatcaaaacactacaaatagcacaatgtaaataacaaacgtctcattctccacaacactatcttcgaggccctatagtgcttaaaatcaaggctcttttataaccacggagaatttgttcacgctataaatagataaaaagaaattaaaaaccttctccaaaaaaccgatactgaataaacgtaattgccaccccaatacaaaccattacagaaaaaagaaacatatcacagaatagttatacatctcttaaaaattaatctctgggggataagcaagcctaccctattacatccattataaaacaaatggcaaaccagagtaatttgaaagaaacaaaactaccccaaaatataatcttcctccaaaactcatatcagaacaacaattccattcatcccagtttcttcaaaaaaaattgttaattccttttcaagaatcttataaaataaacaaaacctcataaaatggactacaaaaagagttgaaccctttcatctgaacacaggacaacaaaaataaatgtgaatgcttcgaacgtgccagagacctcatcatccaacaaaacactacatatatgtggtattccaatatcactcattaacagataccgcataatcaatcataggtggccatgatattaatagaaacttttttgcacgagacagaaaaattcaatttttatagaaatctccaacaaaattcccttaatacaactcaacacactatagtgatacctgttaaggattataaccatttatcatctatttttatataaataaaaataaaaaaatatttttccaaaaaatacggttgtaacaaatttaaaggtaatgaacctcaatgaggtcatttcagttgttacactgaaaagaacagatactacacttgatctaagccaaaaggcaaagagatttggttttttgaaaaataaatcaaaagaaaaaacaggaaaaacaagaaagaaggaggaacagaagttaagacaaaatatgtaccgagaatgtcagaggaacggaagtaaacacattttcattttgagaagtcttacgacctctctccttttatactaaaaaaaaatgaaaagaaaagaaaagaaaaaaaaaaaaagcaagacaagaaaaaaaaaaagaaattaatattttctaggtctatacacccatacaccaagcaatatgattttttttcctaaacctaaaacccagaccacccagagaggtacaggtgttatacatatatctccgttttatgtgacaaatcctccaaaggtcatgtgacacatgattgacttgtttaatgctatgacgacattcatgtatatacaatatacaataaatatatatacaaacctaaaaattataagttatgtctgtttatatctaatattcgggtttttatattttttatttttattttttatttacttattaatgttgtgtagtctgaaacttcaatgccagttgcttccgtctgaattctttatattgtgcatcttgtcttgattctacacgtgaaaggaaatcttgttttgctaaataaccacttctcttattatattgcaattcatcttctataccttctctatcaacatattggacccaatctaattttgacttttctaaggtacttaatttgggtttcaatgcccccgatataatatcttctaagatcggaggtctctttagtggtcttcttaatttcggcttattatcaccatcaccatcaccattgtcatcttgaaattccttgtgtttgattatttcatctttttctgaatctttcttatcgttattagaatttccatctgtttcatcattttcaatagtacttctaccaatagtgctcccacttacaacatccttgacattatggttaaatttcaaactatttaaatattctttagcttctgcacttgatttaagtacccattttttctcgtgaattatttctcctgcaaacttgtaacttctttcaattaaaatttccccttctttctccttaactaaaccaagcactcccatttctgtcgtatcttcatgcaatggttcaacagatataactgattgtcttgccatttttgagtcaattaatctcttggtgctttcattctgcatctcactccatatatctatgatcttgtcagacaggtgcaaatctgatgataccataatattatcatatttatgtttagccatacgttccctctccaattgatggcctctacgagtcttaattaatcctccgacttcactctcaatcttagaataatttctagattttatagattcgccatcatcgctatcttcacccttatcatcgtctacttcttcctcctcatgtccataagatatcgtcttaaattccttgtctggcacaaaatcttcatcttcttcctcattatattcttcattctcattattttcatgaacagaattgttaatcgttaatttttcatccataatactctagtgattattaaccatatgtttgattactattattactgttgttattaaagtgtttaaaaaccatatatcactgacaaatatcaacaccgcattgaggtttcttttcctttctagttttgtttagtaaaaaaatgcccgtgaaaaatttggaagtttaatatatatatattttacttcctaaattctatactatatttaacactactattaaactattaaagcctcacgcacagttctcctacatatttctcacattattgtatttatttattattaacatcaatttaatattcaatagaattttttttctttcgctcaagctgaaagaaaatttttttttttaacctgcaattggattttttgatctatttatttaagtcatcgagccaattttaggctataaactatacaatcatatacagttaacattaaatacataactctttttcacacataaaaagtagtactaatcaatatctcaacataggacttttttaagatgaggtttttaattggatgcccagaaaatggttctcttaaagaaatcatttgtaatattggtacagattcatccagaaaggattcattacaaacattttatatagcaaattatgtttcagaaggttcgaagaataaaattgacagatggcattcattgaaaaaagatgcaagtagaatgataattactagaaaccacggagtcatacaattaataaggagaaaaaacatttcaaagaaggatgatgaaaggcaagttgaatatgatataagtgaatttgaaatgttggattttataaatgatgataatttattaaatgataagattttagaaccgctatttatcaaatcaaagaaaagaaccaaactggtcgatgaatttatttgtattgccccattagatgagaatgaaactaaatttcttgttggcaccaagtctggtttaattcatatcttagcactaaatagtacttatacaagtatatctaaagttgtaacacacgaagttaaagcacccttggaatttgttcaactatacgataatgacagtagtaatagtaaaaatcatgtctttgctattggcggtgaagaaaacttaattaaactatatcaattgaatgaagatttacaaactttgtccaaaatttgggaagctaaaaatgtcaaaaatgatagattagatatgagaatccctgtatggccaatatcactaaaatttttaaatccatgtgaaaatattaaacaaaaggatcaaactaattatcaatttgtcactattacaagatattcccatttagggatataccaaacccaacatggtaaaaaaccattacattacatagacctattaccaaacagagaacctttaacatcattagaattagttgatgatgatgttaataaattgacaccattagggaatttaagatcatctgatattactaatttcaattttactactacagacactaaaaaccaagtcttaaaatacacaaactctggtagactaatcggaaagtttggtaaagctgatatagtaggtgcatctaattatattcatatcatcccaaacaaaaatttactaatccaagttggtttagatagatatttacgtgtatttgacgtaaattcactaaaaactttgattaaagtatatgttggatctaaatccaattttgtagaattaatagatgaaaatgatattatgttacctgacccagcttcaaaggactctaataaaaaatccaaaaatgattcaacaaaaaggacttcagaagcaatatatgaggaagaagaagatccagaatttttatgggaacaattagagagagagactaagaaggcaaggaaatcaaagtaataaaagatggaagaaatccataggaaaagagtgtagatatccttatttgtctcttttccttcttttctttttatagaatgtattatacatagatatctatatacaataataataaatacattagttatttagtgaccattgtggagctacctgacacattattaaaataatttatcatcatgtctaccattcatcaacctgattgtacataatactaaaatcattttatatatatctggatgtctggattttccattccatattttatgaaaccaaaacaggctacaagagtttgaaatattctttcaagaagattaagagaaggaaagaaacaaagatagaaagtcctattacatactgatctctcgccttttttgtatcgttttcacaagatcaattgttaatttattacgactgtgcaacttccttacttttttctagtttgcttgaatcacttaaaaaaatatgtaaattcaattaataatattcaatattaagcataagtcctagttaattaaacgttctctgtgtgtgacaaatacctatttcctcttcatttatcctcattctgcttattctctttttatttcatattagaattttcaacttatattttactaagcctttgtctgacattggtagcatttataaattatacaaaacacaacaaaacgaagctaagatacctatggttagtaagttttatgatatacctggatctcatagacccacctacagaactccttgcacagaatcttcttctttactttcttcaaggagagaaagtgaaacatattttagttatcaagcaaccccaaggagccgaaagatatcatccaaatatgatttgacaaatccagatagagataaattgggtacatatgatggtgtatttattcctaccgccttaaatgtcctttctattataatgtttttaaggtttggattcattttaggtcaattgggtatcatctgtactctaattctacttctgttaagctatctaataaatctgcttactacactaagtatatccgcaatttcaacaaatggaactgtcagaggtggaggtgcatattatatgatttcaagatgtttgggacctgaatttggtggctctattggattagtattttttctaggccaagtatttaatagtggtatgaacgctgttggtattgtggaaccaattctttataatctaggcgctccaactgttggaacaaatagatctgttggtctactttatcctcttttgccaaacggggaatggtatgaatttttttatgctactatagtattatttatatgcttatcaattgcaataataggtccacaaactgtatcaaaagcaggtagtctattattcttcatattatttgcttcgattatatctataccaatatccactttaacaaaaaatgcattcaataatggatatatcgaatatacaggcctatccttatcaacattcaaaagcaatttattcccacattttactaaaggtgcagtagggtctcttcgatcgggtaaagagtcgttttacagcctttttggtatattcttccctgctactgctggtatatttgcaggtgctggtatgtctagtgaattacggaaaccatcaaagtctattccaaaaggtacattatggggtctattgtttacttttatgtgttattctgtagttgttatatttatggctttttcaataccaagggaatctttctacaaagaagttcaaattattcagtccgttagttctgttcaatggcttatctttttgggtgaattatcgacttcattattctctatcattgtaggtatggttggtgctgcgtatgttcttgaggcaattgcaaaagatgctattttaccaggattagtcatttttagtaataattctagaatttcgctgttgtttacttggtttttaacacaattatgtttattttcagatgtaaataaaattgcatcgttaattacaatgacatttttattaactttcattgtaatgaacttagcttgttttctattagaaatagctgcagcgcctaatttcagaccctccttcaaatattttaatagatatactgcattttctggtggtgtcatatctgtaatttcaatgataattgtagatggatcaaccgcgtctgctttaatttttggtataatgattctatttttaataattcattacctatgtccaccaaaaccatggggtgacgtttctcaaagtctcatttatcatcaagttagaaaatatttattaagattaaaacaagataacattaaatattggaggcctcaaattttactatttgtagacaatccccgtaccagctggaatttaattagattttgtaatcatttgaaaaagggtggtctttacatattagggcacgtcgtcgtaatgcctgatttccaaacacaatataatgaaattaaacaacaacaaaatgcatggattaagattagagatatgactaaaataaaagcgtttgtgcaagttggaatgggtccttccatttcatggggcatacgaaatgtatttttaggttctggtctgggaggtatgaaaccaaatattactgtcattggattctttgaccttcattctgagcatatcaatgaccaattctcagcaaaacataaccctaatttaaataatgtcttaatcgacattcctgaatattatagcgaattacctactgactcttgtgaaaataataaaaagatcaatgtatgccagtgggtacagattttggaagatttgtcattaatgcaatcaaatattgccgtagcacatggcttcaaatatttaaatataccctcgaagaattttgtaaaaaatgattcagagaaacgtagaatcgatttatatccaattcaaatgtgtgcaacaatgaactcaaatagtaagtatccaacaataaccacttccaactttgatacacatactttgatgttacaattaggtgcaatcttggtcacagttccagaatggaaaaagtcacatatattacgtgtgattttattcgtagaaagagaagttgatagagttatggaagtcgaacgtatgacaaaattgttacaaattttaagaattgaagcaactttagtggtagtatcactagaccaattccgtgtgtataacactattgtaaaaggtgattccatatctttggcttatgttcaaaatagattgaaaaataaccaatggtggtgtgaattgactgaagcaagaagaacttttgaaccaaaacgccgtttttctgtaaatacatctgttaacatggaacacaaaaaagtgaaatctaaaaaatacgatttatctcaattacaaaaaatgggtgtatcatttaagatgagtgccataatacctactgatgtacctgctacccctgcgatcagcgacatttccagtgatgatgatacttctattaacgggtctcaattatctataagtcaaattacgtccatattacataaggtagatttaaaaaagaaatattttatgccaaacaagcatacgtacaaagccaaatcctcaagtaatcttaaaccagttttttcaagcaatgctttaccaaatactagagttctagaggatggaacaggagataaacctacaatcgtaccagtcacagaggatggcagaggcaatctatcaccaaaaagccccatagttcctgatttatctccatgtaattctgatgccagtttaattgaagcaatgaacaatattaaattcgatgatttaccaagtcgggcacagtatttaattttaaatgatatgatggttcagttgtctcgaaattctgccttaattttttctactctacctattccaccattgggaactcacaaaaatgaggaagatagtcttgaatatgtaaaggatattgatatatggttagaaaggttgccaccaaccatgctaattaactcacaaaccatgactgttacaactgcattataagaaaaagaaaacaatcatagcgtcaagagcacatggcaaatataaactgtcattttctcattaatgataataataagatcaatcataagactaaattagaaaaaactctccatttgaggcaagtttcaggtcgtatcacagtttcttccaagaatcctattttcgacgtatattggtcctaaagtaactaaaatgcatgcatcaatcctgttacaaatagtttagcgttctatttatcctaattgtaatatctatttaacatttatctgccactatacaaatatatgtggatctgtatgtagtatactaagtatataaggattcaacgtctattcggtttcaatatattctcttactttacggaatgcaaatacagtataaaaatatgaagctgcttccttttcatcaccttccaccccaaatttcccgtctgatcgttgcaaaccttctctcattcttggagaaaatctgtcaacccattttggaatctcctgaacaaaaaacttattaaatggcatttgcaattccaattccataccgtattcgtctgcaagacttctaagtgtttcaaaaggcaccacatattctggaacgttatcaatagcatcttccagccaatatgtgtacatttgaccgaagggtgatgggaattcattatcattcttttgataatcattatttgcaaaagtcactctatatatggaattaccccacgatggtttttcaacttctttactaaatttattcattttataacgaataaattcggaatccggaatgctaccaaagaaaaaacctccaacttttaatgatttagtaacattcaaaagtgttcttcttgctttagcttctgtttcaaaggcataatgcaaacaaaactgagtagaaacgacatcacaaggaaacctacattccgagaaaggttctactgccacaccaagagattccccaaaacaatcaccagtaattaaaataacttgataattcaaattcttcatcgatctatatcttttatgagcctcttgaatagatgcatttgatatatcaataccaataaattgtgaaataccaacattaccatatttcctcaaatcacctcctttaccgcatgccaattccaatacaacattaccagaccttgtgtatttttctattagcatatacttgattgcattattaaaattacgcagtttcaagattggtgacaaatatctcttagttttatttgcaatcatcgttctttcattataatgttctctaactatttgatccacattgatcgctctattcgctgttaattctatttcatgtttcttaaattgctcttctatcaatttttgtctctcaagggctcttcttctctcttcttgatcatacctttcacgtctacgtttttgaataccataagatgaagtatttttaacctgagcatcaggagggtcaacatgttcataattcactgatcggtttggaagttctcctagcaagttttcagatttctgctcaggatctttatcctccgtagatgtagattcttggttaaatttaccatattgtttatcatagtcttcttgagacatccacacaggtttttcaatggataccgccatacttatttcaaatacctattaaaaggtctaattagtttctacacttattgtagtatctcaagtgtgggaagggttgaattttcaataaatggtactgttttatctacacaaggccaccaaccacattatccatacagattgtcaagtatacataggctaaaataatgtttctgggccttttttttttaggatctgtgttttaagtctgtaaaaatctttaatggggaaaaaataaatttcatttccatcacaaaagaagaagaagcgatgagttggaaggaggaatatatgaaatcagttaacgtcagaacaagagaaggtttagaagtaacatctaccttgttgtaaaaatttgataaagctttacaattgtcattgcattgaaagtattcttcaaatatatatatgtatgtttgaactgtgaagaactaagaaactggtcagacaacccaaagagaagaaggtatcacgccaaacataaaaacaagaagattgaacgtaacagtattattttatcatggaatcagtaagtaaacctatatcagaaactacaaaatcgaaacaacagttactagaagaaagacgagctagattagctaaatggaaattgaaaaagattcaaaatcaacagccaccaaagactctagataatgatacaacaaaattatcattgcaaccgttaaatcaaacaacaaaaattaccaccatacctacgtccaccactaccacaattaataaaattttatccactgaaaataatattactaacaacattcctgatggaagtatatcaaacaaagtttcattgaatagtaataataacaataaagatttacaagatgataaaagtttagctaggcaaaaaaaaatagaagcatggaagttgaagaaaagacagagagatgcatctaagaataacaaggaacaaagtttaaatccaagctcaactgtcaatacaatcgtcaaccaaaaaaaatataaaaaatctaaaaatatacatggaccaattatatttgatgaagagaaccatgccaatgacatacttaagtctatggaaccattatcattcaatcacttcagtacacccgttgccactatcgatgaatcttcaaatgttttcaaaaatagtgaaatgtcagagaacaataatgacaatggtgtagatatattcgaacaattaatggacaacttggaaaaaaatgaaataactaataataaaaataacagctcctctataaatctaaatacctttgatctttttaacacagatgagtctggcacaatagatgatgacagaatggaagattctgaagatgatatagaaaccaaaaataaaatgaaaagggtagcaagattaaaaaaattaaaaactgttcctgatgttaactttaatcaaacatcattagaaccgattcgaaaagtgttttatcgcgaacccaaagaattagaaagactaactatggatgacattgaagaattgagattaagattaggcaacataaaagtcaaaggaaaaaattgtccatgccctgttctaagatggtctcaattaggattatcaacatcaataatggatcttattgaaaatctttttaaatttgaaactttaacaccaatccaaacacagacgatccctgccattatgtcaggaagagatattattggcatatctaagactggctcaggaaaaacacttgcctatcttttacctcttattagacatataaaagctcaaagagacttagcgaaaaatgaaacagggcctataggcttaatcttggcaccaactagagaacttgcattacaaataagtgaagagattgacaaattttcaaaacttgacaagtccataacatcactttgttgtacaggtggttcagaaatgaagaaacaaatcactgatgtgaaaaagggtgttaagatagtagtagcaacacctggaaggtttattgatcttttgacactaaacaatggaaacttagttaatacatccaggatctcgtttgtggtcttagatgaagctgacagattatttgatttagggtttgagcctcaaattactcaaattatgaaggtgatcagaccagataagcaatgtatcttatttagtgctacattccctaacaagttgaaaaaatttgccataagagtcctaaaggatccattgagcatcacggtcaattcggctaatatggtaaatgaaaatgttaaacaaagtttcatgatctgtaacaatgatattgaaaagtttaataatttattaatgatattggaaaatcatttgaagagtattgtaatgtcaaaatccaatgatattgatgaaaaaataattatatttgtatctagtcaacaaacatgtgatacattgtatgaaaaactagataattataattatgaaatcttttcaatacatgcaggtaaatcttaccaagaaagagtgaccaaccttaatgattttaaacaaacacccaatagtattttaatatgtactgaggtgctttcacgtggtttgaatgttccagaagtttctttagttcttatatataattctattaaaacgtttgcagaatatgtccatactacaggtaggactgcgcgtggcacaaaaaaaggtcaagcattgaccttattgttaaaagatgaacttgcagcagcatatatcgttaaaaaggccattcgagaaaacgaattattatcacatgaacaaaaacaaatcgatttacttactcaaatggctaatgagtttgaggctggcttaaaaaatggtaaatttaaattattcaaaggttttggaggtaaaggtttagaaaatatcgaaacacaaagacaagaaataaaagataaggaagtattgacttattatcctaatgcaattgaagaaaatagcaagaatgatacaaagccttctgtaaacaataatgaaaacaatgacatagaaattcctaaactggaatacactacaatggtaaatcaagaaatagatagtaccagaacttatactattaaggttaatgtcaatgatttacctcaacttgttcgttgggaagctactaaaaacactacattagcttttattaaaaatgaaactggctgtagcataaccactcgtgggcgctattatccacctggtactgctccaaaagatagtaaatcagagcctaaattatatttgttaatagaaaccaatgaagaaaagaacataaaactttgtatagagttattaaaagagaaagtacaagagggtataaagaaagttgaataccaggcgtttaaaaatacaaaattttaatatgaactcagttagatggaatcaacagtaccataaccatcaacatacacacacgtatatatatatacagatatatatgcaaatccttttaaaatttccatacaaaattatcaagtatacattaaaaaataaacaactatttctatacataaacagtatgtctaaaattatatattaataacaatatatatgttacattaaaacttatacatagtaaggtgcgttgaacagaaaatactttacaaatgtctctattaatggtgcaaaaacataactttggaatgatattatattatttataaggtcgaatatgattattaacataaaatcattaatgctaaatgaaaatgtgaatatttatacttcaaagatttcatgaaaaagcaaatacaatgaataaaatgttttggtaagttaaaaggaaaaaaatagaagttaaataacttcatttaaataacaacaatgataatgaaaaaggctatatcatttctaatgtatagcttttttatctgagtaccacatagaaataatgtaatatttcaaaaagaatgtgatcaaacacatgttggtttcaaatttttcaagtctggaattggaatatcatcaacttttaaattttggaatttgtttaagacttcttgtaaaacggaatatttcacagctgtaccagtagttaatctagccaactgtctcgagtcacgacaatatggagaataacgcttaacaattttcaaatacagaatcatcctgtcttcactagttggtttagtttgttcatccttcaacatagtaacttgattacttgttgttggcgttacattgttacttgaagaacctgcgtctgcatttatatcatcaaaggcaccagacgcatttaatgcctgaaatgccggatgtgaataaaaatcaatatcagtaacttgactttgagggattggagaaccacaaggcgttggtggaatagtgttcataacactatctgccatattaatcgtaacaggtgtattattgtctctctttgactgagtccatgtgactgtagcatctcttaaagccgcccaatctgcattagcaataaacctctgtccaatttcatcagacttactaataaggtcgatccatctttttaaaatttcttcatttgtagcatcatcaattgatcccattgattttaataagattctatatgcaacaattgtctttggaatatcatacgattcatatgcctgatcaatatactccaaaatctttctatcatgccaaattgtacatttagctaaaatgatattaaaaaatggctcatcaatattcttaatattattgtaggtttgaattaattcttgtaatctttggaaaccttgcactttatcattagcataattttcaaaaaagatatcaaagaatgtatcatttagtgaggacgaaataccatgattaacattacggccataatgtaaagatgatttataccaaatcttgtaaatatggttaaaattgtgggtttggttccaaatatttcttaagaatgattttacataagatacttgtaaatcgattttatatggcatttcatcatttaatgctttatcgaaaaaggtttgtgcgacattcaaatctttacattcacctataaacgacaaatgagtttcaatcaaatacccatatttcatctctgtagactcttcacataatttttgaaacaacttcaaggccatttcattttcatttgctgatagagatgccctaatcatcccaacagataagtttggatgaaaataattaatcattgacgatgatttttcataaagcgattgaatttctggataagataccccattgtcgtataagataggcaaaataacacctactactctcggatttaggaaaatgtttgaagtgtaagtattaactccattaattgcatttttccaaatttgaacagcttcttcaaacaacaataattctttgaaggcagtaattaaatgcatggcaccatattcattcaattctactttaccattcaatacatcatccgatatttctcttagcgacttacataaataatttgtcatttctttatgaaaggattgagaatcgtaatcaggcttcttgttcatacgagtcaactgatttctattagctcttagcccattatgtaaaagatgaactaatttagagacacggtcagaattcaattctggtgtattcatcaaatcatgatataaacccattgcccttccaatggaatcccagaataaaggattggcatttgaattagggtgttcggatctatgcttgatatttttacgtcttggagtctgtgacatatacaaagtttgtgagacacattcttcaaaagcacaaaccttttgaaaccatggggaatctggactaatgctgttattattattactattactgctactactactattattattatttttgttgctgctattaatattggcatgattattattattattattgtcgttatttaaatagcctaagtttgtagtactagtagatctagaagtataaggagtaccttgtaaagaccttgaaatactgttgttaatgtgattatttttctgtggagcattattattttgaaattggaatggagtctttctaccagatatcatattaatatgattatatggttgtggcgacattaggttcatagaagttaattgcggcacagagtttgaatgattagacaacaaatttttgttgttatgattaaagatagctgagcttgccgcatggaaagaattattgattatgttgttattctgattatgttgatattgaaaattatttaaattttccatggaattaaaattacctaacagaggtctgttaaacgcattattaatactattaatagtactgttattaatgttattattattattgttgttgttgttgttgttactgttataattttgaaaaggaatattggaagttggtaacggactaggaacgggagaaggagaatgaaccataaaatggtttaagcttggggaaagtggattttgagactgttgttgtaatctatacatgaaaaaaaaggtgttggatataaaaactgatgcagtgataaaataacttaaagatggtttaaagtgcttattaaacaaaaaaacaaaaaaaaaaaatgaatggaatatatatttgatattaaaatagaacaatttaaaaattacgatgatatgagataaaataataataaaaataaaaaaaagaatattatagcaaaataaagttactctgcgactatctaaagatatctcttactttttgtcgttttttctttctctttttttttttgttcttttttgctatcttagttatttaacgtattgtgaaatggcaagaagttataataaagaaaaaaagacgggatacacttttaacatagcacccgcaatagcttggctttaaaattctagttgtttatgtatatatactataaatttgcacaacagagagtcagaaggaaaaatatagaaacaaaaaaaaaattaaaaaaaaaaacacgacaccgtttgtcgtcgagaaaaatcgaagaaaatgaaaagaaaaaaaaaatcatcgcatcaattaaaaaaaaagaaacgatgaaaaatttttctttgtttcttctcttcttttttattttttctttttaatttctatttccaatttggtcatttttctttttttttgtgttctgataggcaccaaaaaaaaggaagagacacaaaaaaaaaaaacaaagaaaaattgagagaagaaacaatagagcgcagtgaaaaattttttgttaaggtgggttatataagtgatcttgaaacaatatgcctcgttcagagcctctattgttctagacgtctaagatatgccttttttgtgttttcttttatttattttcagtttctcgaaatggaaaaaaggaaaggaaaggaaaagaatagaatagaatagaagaacaatagttttttggcttgcatgaaaattttccgtgtttgaattttgtttttgtttttgtgtttaattttacatttcttattttcccctaatttcagctaattttccggttttttctttcgaaatttgtactttatttacttgtttttttttgtcaatttttgacgtaagttcgaaacatgatatatttattaataagaaaatctcggattctacttaaatctctcattgagtaaaatttactctattcaaacacacaaatacacacacacacatacatacatatatatttgtacaactatataataataaacaatgattcatttaatctataatattggcataaagtttcctaatatcattagcggtaacccagatatatctcttttcagagtccacatacaccgacaatcaattatattacctttaattggggacaagattctacaggttctcatatattctgaacctttaaaatctttatatgcgacactggaaaaagttttaaaataatcccttacactttcatcatctaatatctcgactataaacgtcatcttatttaataactcctcccttgtccaacctgtcaaaatctcaaattcttcattaatatatgatatctgtccattacgtctccatatacatgttggtgtgccgatctgttcgagaaattttgcatattccaataatgtcctttggtagcattgttccataaatatcatgtcttcttctgtcaaagtaactgaacacgcaataaagattggtctaaattctgccatcgaccggcatatctctataatatcttttttattaaacctacttcttaaatacattagcaagtgatggaacccagccgtatgtgaaaatggtttatttatcatagtatagatctccattggggtcgagtatcgtaacgaatgttcccattcggggttatttttgatgtttgttatctctggagaattacattctaaagcaaaggacaaacgtgaccggttttttatatttgaattaagatatttagtagcgacttcagggaaagttgttgtttcggtatttaaataaatttgattgatcttgttatttttttgtaaatgcgaatgtttatatcttggatccaacgcgatcagccttttaaatgatagtgaattattacctggcgggttcgactcaactgggatcaatgggaaatggtgtgtaaagagattaatcttcgagctaagaatactatcagaatgtgggcctaacagtatcgaatatacattctgaaatactgaagggtattgttgtgttggaacattaattatattcattgtagcattcgctgtctgttgtggatctgtcttgtatggacttctttttattgatacattttcgtttataggactgctattgctagtggttgaagtatttgacgatatttgttgttgataagccgaacttaataatgctacctcacttggtcttggtgataatatattcaaaatagaaacgctagtactattactactattattaatagaattcttattattagtaggaatgggaatgggggtaggagtaggagtaggggtaggagtattattattattattattattattatctataggatcatgatataatatattatctacaggaattttattaaacaaaccatcttgttgaatcatattacttagcattgaatattctacatctgcagcatttgaaagaaacttagatttatgtataatatgttgtggtttatagaaatgctgtttctccactgcgacgttttgcgattgatattgtggatacgacgacattggagataaaggattagaagaagaactattagcattaacattagcatcagcactctgatttttaatacttaacagagacctattagaagggattatagtagaatcattttgcatggcaacaggtagaatattgtttggtacacccaagagatatttatgtctctttctcggtgcatccacacaagtctccgatatgcctttatctatacaccttctacatggtctatttgaatcacaggagagatgacacctggaacagtggatacatgcaacatttgtatttttctttctacgtggtttgcccttatgagttttattgttacttacagatgagccaatgttcataagttgatagtttatcgctttatttatatatcagttcgtttggatatataatattccaagagaaagagaaagagaaaggaaagtggagcagtcaaaaacagaccttgaatcacatgggatatgagggatgtcatcaaatgctgacaatatgcctgtcttgttaatattttattttcctacaactactgacatcacacacacacatgtacaatgtgctattacaatctaaactgtgtcttagccttaaccagttcgaaaatattgaaaaaaggacagacccagaaagttagcgaggataaggtaactctccctgtgcggctttcccgcggttttttttctatgacatgcggaatttgcaaggcatggaaatcgaaacgttgaaacgttgaaataagtatacacagatcaatgttcattcattcattagacttaatgatcaaattaactaccattcaacatgaccagtctaaaacatggttatctttctgtcatgtatatgttgtatttgttgtttccactaagataaatcacacttcaaatataatctcttctacaaataatgtataaacatctacattgcagaaatcaatccatttattcaaatatacacagacacatactcatactcatactcatgtatatatatgtatatatattgcagactggtggagaatcaaatccagttgagttaattcgacttaatttgactttccattcccttggtacgtcattctatacgatgaaacagaattatcatgtacaaaacgatcgtactctttcagcactcgttctaaatgattaaataggggaaaaatattaaaataaaaaaaagaatgaaaatttttgggtttagctggttaataaaatatgacattgtttttgatgaatattgaaatattgattatcattattattattacaactatccggctatgcgaaaaggctaacttgcttatagaataactttgcactgcgtacattctttgactatatgatattaatactaattagttattacccctctttgtttatctcttattcattcttttcttgttactctcccaatatatatatatatatacgaagctttggtcagtccctcttttcactaatatagcgatgtctgaactaactacaaaatttcaatccctaactattgctaaagaagctgtcaacttatctaaggaacaactagcgttaactgctcaatgggactctcttttgaaatccggtcaaatcgaacaaaatttagataagatcaatctctctttaagagactcaagtttcttggcatctacattgcaaccaacagtcactgacgtctcaatgttcgaggcagtttttcctatcgctaaacaattggtcactagcaccaaggacatcaagaatgtttactctaagtatagacatatctttagatgggtcgatttcttacaacaattgttggctgttccaagtaaagatcaattggttttaaattacgatttagatttaccacgtgaagttattgagaaaaagaagaaaaagacagatgacaataagaaatctgacgctgaaaacactgctgcctcttcttcttctgttccagctgagagtggcaagaaaagtggtaagcaaccaagaggtaaacctgatgaagaaacattaaaaagattgagagaagaggccaaagctaagaaggccgccaagaaggccgccaatgctgctaagcaagctgctgaaaagaaagaagtggaaccaccaaaaccatctgtcatcgatttccgcgtcgggttcatccaaaaagctattaagcatccagatgccgactctttatatgtctccactatcgacgtaggtgatgtagaaggtccaagaaccgtttgttccggtcttgtaaagcatttcccattggaagccatgcaagaacgttacgttgtcgttgtttgcaatttgaagcctgttaacatgagaggtattaaatctactgctatggtcctttgtggttccaatgactctaaagttgaattcgttgaacctccagccggttctaaagctggtgataaggtgttcttcgaaggttacggtgacgatgaaccattgaaacaattgaatccaaagaagaagatttgggaagccttacaaccacattttactactaatcaggatttggaagtcatcttcaaagatgatgaaaataaagacaaacctgtattgaaattaactaacgctaaaggcgaatcattcaaggttgctacaattgttgatgctcaagttcgttaaatcgttattcaatacttatatagatacactttcgtataaatataagtatatgtatatgtatatgtatatttctttctttccttcttctcgactagtattgtcatttgtagttaacaaattttttcatgtcaaccgtgttgactatggcaatttttttttcttgagtagttgcatctttatacatacatacatatatacaccttttaatacacatatacatatatatgtttgtacacatgtattttccttttccctttagcaaattggactgattgtagacatttcagttattccataaatgtctttataaaattgttcattacatttagattgcaattgccagtaatttaattgtgcagtggattcagtaacatcttcatttaaagccatttgtaaatataccttttctttccatttactaactaatttctctgtgatcaacctatctaattcaaaacttaaactctcctgataccaatcttcagattctagaaatgtgttaactaaatagtgacaatgattgaagacttcgcacgaattagtcctatctacaatgaagttgatcaatgggtacattgaatatctgacacatttttgtgacaatatccatttctctacttggtcaaaaatttggatttcgatatcgtacaagctgcaaaatataaggatgataagagttaatcctataatttgcaattctttgtctcgagatccaagaccaatcaatttgttaatatacttttcgaaatcaattggatacggcccttctaagatttcatcaattaaatggtatgttctatatttcttatcacagacctgctttatatgttttaaaaaccaatggatatacgtttgacagtttaaaaccatattacttgtatgaagagtcagtaatagatcgaatattgtttctttcaaacctttactatgatttgattgttgtatatttatatccaaatacgttagtggtgataataaacctataggttcattgtatgataataacgctgtatacgaatcttctaattggttggttttaaacttgaacttgttaagctcagacaggtattcaatattattctcagcaatagttccatgtgacatatctgatcctggagaaaacatagaaaattcagcgttgcttaaagtgccagtaaggctaattgtatcatatgatccgcctctttctgaggataggtaacttgaagacacatgaaaggcgttgaatgggccttgtcgatatttcttatctaatggaatatcactatcactatcattattattattattattattattattatttgattcaacctcattttctaaagcatttaataaacatgtcaattttctatcaataattttttggtcataacatttgattggtgctggaccaaaaacagattcaacttcattatcataaatttggaatcttcttacactaattgtaaaagattgatcattattagttgtatctcgaggagatggcttgctatctattggtcggttcaaatgaataatatctttaaattcgttctttgataaaccatgcttcctatttttggtgactttatttcttttcttgtctaaatgtaaaacatctatgatatcatcatctgtagtcttgtagatattttcctctagccagaccaacctaacttcatatgaacaaggtaaatcgtgtttagcacataacgtacaaacaggtctgcgtacatcacatctacgttttcttaaacggcatgaccagcagccagtaaaagttctctcttttttatctagttttatcgacatatgaataattataaatatattcttattctataaaaaaaaaaaatagcaaaaaaaaaaaaaagaaaagtagaataatgaatatgagaataaaaatctataaaaaatataaattgtatggattatggcacaattgtacacggttttatttgatggagtgtattagttgaatatttttctttgttattctaagactacaacaaagagacaaacgttataaaaaaaagagaataaaagcgactttatatccaaatgaacgtggaagagctgtcatagctagctgataagaatttaaacacgtactttaagtataagtataagtatatatatatatgcaattgttgatatattttgtcacggctaaattagtagtttacaaagaaagataaatatatctgagtcggagattaattacaaataattaacaatatcattgcagctttaggacacattttctttaaccagtctcttttgtttctcaagttacatattagataagtggcagcaatgatttcagtgattatgaagtaaaaagatgacagaaaatatgcacttagcagttcttgaattttattcacttttcgggacgagtcgaaaaagccactccgacacccagacctcacacatgccatatctctctctaagaagataaaaaaataaaaaaagagagagagagagaaaaaaacacacagattcttactgacaaatattgtaaagaaaaccatgcaaaagtaacaaattttagcatacctttctttccttctttctttctttcttcttatttttgtcaacacaactaatttatgtaatgtaacaattgactaatagactatctatctatctatctgtctaccagtctatctattgaccaatgtacatatttattattatattcactataattattaaattactatgttcaataatagctctttttatgtattctgtcaatatatggtaggtttcattcgtttttttcttttctttctctttcttttaagttatatttttgcagaatttctaaatatcgaaaattttcaataatcaaaattagggattttactcgagaattgtcgtgaataatagagtataaaaaaacttattaggtttgaagaatatgttgattgtgtcaaattaacaacaaaaaactaacgacaaaaaaaataaataagtagttctttgtgaatgaataattgatatacaaggttatttttcattgcaatgttgtgaatattcttttttttcttttcttttcttttcaaaatacataaattgtggtttaatgtacccatcccatttctttatggcctaggtctctaaacaacgtacttccagaaaatatgtataaatatgggtagatttaaaaaaaaactctgttatttagggaaattctacaaagtatactagttatttgagcaagaaactcgagtcttttggaatcttcaaaggaatgtgatagaaaatataattgatataattttgtgaatatgaaaaggtgatatataagtatgtatagcgattaatgttctcaagtataagaaaacttgtgattttattacaaaaaaataaaaatgaaagtaaaaataaaaattctttagtaaccattccaaatctcgtcatgctgggtcttatttttagtctctggaactttgtgatgtatataattggtgaaccataatgcaaacatagcaaatagtagatatacatatcctccaacataatcgttcaaaataggaaatccataaccaataataaatgttgctagccaattacatactgtaccataactttgtgcaatggctttatcttgtttgcctgataattctccgatgattaagaacgggattggaccgattccaattgcgaaaaatccaatataaacaaatattgatatgattaacaaaacagaaatgtgttttacaatactcaaacttattaaaattgacataatcgacataaaaattgtagatgacattaataatggcttacgtccaaatctctcaattaaaatagacgataaaaatgttattataacgttaattattgatattgaaaaatttataagaagagcttggtctggtaatagttggcttaccactttaacaccataaaatattatactattaataccacaaaattgttgtcctactaaaatagcagtgattactgtacgtgacttagaataccttggacttgttaagtatcgccacattgttatatcagaatcattactatcatcgttaatattattggtactattactaggggttcttgtggtatttgtattatctgttgcattagaatgttctctctgccaaccttcaatctccatttttgcctcctcaatggatatttctctgatatgtgataatgaaaaatatgccgaattaaattgattcttagataataaccacctaggtgattcgcatatggtaaaccagccaataatatttacaacagataaaatagaaccaataaacaaaatatttctccagtggtttatcgtggcgtatttaatggctacactctgtgttaataaaatcccaaggttaatgcaaaattgattcattgtacctaaggagccacgtagactagttggagcaatttcattaatgtacaaaggggtaataactatatttaatccgcatgcaaatccaacaccaatccgacccataaataattgtcgaaatctattcgaagaaaacataattaatgaagacacaaaattaattacatttgctaaaatcgcagtttttaatctaccatacttatctgcgaatctacctgccactaacgaaccacataaaccacctatactaaatatagcagtgattattccaaattgttgatttgagagttcaatgcaatcagcatactgtccattaaaactatgtgtattgttacaagtcattacctgttgtggtgcattcaattctgcaatatgatacccatattgtaatgaacccatgcatgccactgtagtagcaatgattaatgtcttagtaaaccgatacttttcttttggacccaataatgactcaatatctgtcattgatctactatgtttatggggttttctcttttttattttctatatattttctctggttccaatctgttattgctatttttattatgaaacaatttcttgttcttatgaaaccattgagttttcaagaaaatcatattattttaaagtattcattaaagatctgcttgcttttgtaccatttctttgctttcttttaaataggaacaccttgatgattttaggagtacacccttaattaagagcaaaagggttgcttatccaaggttttgggcctctaatgcagcatatttagagaaaaagaaacgaggattgtagaaaatttaaagaaacagttactagtaaaaaaaaaagaagttagaagactgtttcaggtcccaacacccatacattttattgctattacagttttttaaaaaaaatttttatttggagaaattttgattaactttctttcctttgaaacaaaaattgcagttttgggaaatttatacgaacttttgggacgcgtgtcatctctttttttttttgattttcaccaaatagttttcattcattgcttgtgattcattttttttttcataacaaaattttgtttgacctaacttcttaaatatggttatgagacatgcgatatttaacatcatctaattgaaaatacttgagtattacacattattatatactttggcacttttcttattcttgacaactttttctaatcatacggaaagaatccgttaagtaaaccagaatcagaaatgccaaccagatttactaagactagaaagcacagaggtcacgtctcaggtatgtagttccatttggaagagggaatgaaagaaccaagacggtgaatcttttttctgctctatagagctctatcctgctcctttctcatgttattttggatacagtataaggaaatcgattgttagtcacgaacaagtacgcctgaactattttatttttaggcttactacaattatgtttttttttctccatttcttttttcgtggagacgtttcattatcaaatatcttattggtaaatgataatgtgagcgatatgaaaactcttccatcgtgttcataacaatctacacgtgtttgtgtgatttcttctattgtgtccaaatgaaagctctgctcaagattatttggattttgagcagtactggcaatgaaagagtggagtagtattgaatgcttttgtagagtaataaagataaaccgctgggatcttaacaatataactttttggaatatctatttgatcgttacatactaaccgaagttttttatattaaatgaaaattaatgcaagttcaagacgttttgtcattgatctactctttatttttttttaatatatcgtgttaactattttttaacttctttttaaatagccggtaagggtagaatcggtaagcacagaaagcaccctggtggtagaggtaaggctggtggtcaacatcaccacagaatcaacttagataagtaccacccaggttacttcggtaaggttggtatgagatatttccacaagcaaaagaaccacttctggagaccagtcttaaacttagacaaattatggactttagtcccagaagaaaagagagacgaatacttaaagaatgcttctgcttcttctgctccagttattgacactttagctgccggttacggtaaggtcttaggtaagggtagaattccaaacgtcccagttattgttaaggccagatttgtctccaagttggctgaagaaaagatcaaggcagctggtggtgttgttgaattaattgcttaattaagttaattagaaaaaaggatatatatttttatagcatataattgtatagtactttttttaattaaatgatattaaaaattttagttcatagtttctgagtaggttaatagctcctttctttactttttctgcataggatgtttctagacaggtaaggcaaaaggtttgcaggtctgtagacgctgaaatgaggtggttctgctcaatagaattttgcagtgttttttttttagcatttaacgtatttaagctaaaattcttacgaaaaagaaatttatcgatgatgtttatcgcagttcccaattaggaaatgtctttgtttgttaataaataaaaataaaacttgtaaaagttgtatatatatatatatgtatgcatacaaagatgtgcagtatatgatctacttatgtattcctatgttgaaagttgtttgatcatttttaagttcgtaattacttctatctctagtatagaataaaaagtcatcagttgtggtactgttgagatacctgtaaatataaaccacgttatatccgagaatctattttatattcgaaagatttccattgtgcttaaaataccgaacaaatttaatagagatgagcaccattacaacaacaactaatgctacaactacaacgactttcagttccaccattaacccgttggtaactgaaaaccaaatatctgctcgtattaatacaactgcggaaaaatttaaaaaatgggatcctagagaccatatcccatcaactgtgcaacaattactaaataaaccatcatcgaactatagattggcctttctaaatgtgatccaacaacttaaaattcaaaagagaacaggttggttagactatggtatgactgaatgcgaaagtattgctgatcacatgtatagaatgagttgtatttgtatgatgataacgaatccattagtaaacagagacaaatgtatgaggatcgctttggtccatgatatggcagaatctatagttggtgatattacacctgtgaatccaatcggaaaaaaggaaaaaagtagaagagaatgggagactattaagtatatatgtgaggatttagtaaaaccaataagtcccttgacatcaaaagagattatggaagattggttatcttatgagaatgttagttcattggaagcaagatacgttaaagatattgacaagtatgaattacttgttcaatgttttgaatatgaacaacaatttcaaggtacaaaaaattttgatgaattctttcaagctgtagaattaattaaaactgaagaagtcaaaaaatgggtaaacgaattaacaacattaagagatgagtattttaaatcattaaaaaattaaagagtacaattatatatatgtatatgtatgtatatgtatatgtaatgcactcatatgcatatgtgcataatcaggagtgagagaagaggtccactattcattctgttaacgaatagtccataaattgtcatggccaaatattaaagagccaatagcatgtctgcttaataatgctaggatgccaataataaactgtccaagtaatatggtgtcacacaactgatcttctctcatagggccaaaccatactaaagttaaattaattaaagtcatatttgaacatgaaacaatattatttttctttgtcttatcatattcaatatcaattagtcttattttatgtaatattttcaagactggtatgaaccattcttttgggaggttttctttcaagtctgttcttgagggatatagtagcccatccttttcattaaactttggtaatctatgtctcggacatggtacaatattgaaaagttggggacatgaatatataaaattgaatatctgtggtatgaagagtaataacattgtctttgagaaatgacctaagattccaaccactgcaaaaaccatacctgcaaaataacaatatgtgtcaccgacaaagactcttgcaggccatttattccacttataaagagccaaggagacgcctaggaaaggtagtattagaatagttgagaatctatgagaatcctttgcagtatcaattcctatggtgagatataatgtgtcattaacaagggataaaacagcaagtatgatactttgtccaacttctagcccattgactccagctaaaatgttaattgaatttggacaaaatatggtcattgcagccatataaatataataaaatatgcctagatctataagtgacttgccattaaatagccaatccctaacaaaattgggaaccactacgtatgtaacaccgaagtcaacgtaatacactaataataagggaatggcagcaactgctggtaatgggaatttatgtctccatctaagatcaaataagtcatcgaatattccaataatgaaagtactttctagacataaaatactactcaagtattcacttaatttgttatgaggaaagaattgtcttaaatgttcattattgatattatgatttattatttcgataaaagaattacgttgtccaccaccttgagtttcaatcaccatatatctgaaaaagataaaagggatgcaaataaacattatcattaaatacactaaagtggcaatggctccgatagtctcgggtaatacaggtttacctggcttactcatatctttaccaaaaagaccagcttttataaatgaaggacctactttaggaatcaatacatcagtaacaatgtacccgtatatggaaaatccgattgcagcaaagatagctgattcatacctcgaataatatagaagcgatgtagccaccaaaaataacagtgtagtaaacattgtttccttcaattccacctttcttttgtatcttgtcccttttcaatacctgttatacatatagatagatagatagatagatatatgttatgttattttattttattttattttattttattttatgtaacaaatattgaaatgaaatacttagtttttatcaggtgtattttagttttgagatgtccacctttaataatccactaaagtgtgggtactgtttatttatgtatatagtcaattgtctgtttatttgtgaatattgaaaaattgtgttactcttattttttttccttttttcaatgtttacatttcattttttgaatctttagatcttctacatactaaaaaaaagaaaaaaaaaagttaaagaatagaaaataaaacaaaattatgtgtataatgtatattttcaattcatacttgtttaaaaaaacaagtgagtaagacacatgttacagataatcatgcaattgtagtgtgctagatggtaggaaatcctatcatattaggttatttatttacatactcttttctgtttaatatactaagtaaggagagatgaggagcggagggaaaagcgatcagtatggtaagccatttaggtatgacgaaggaatcaagtctttattgcttctataacaaggcagtcaatccttgttaattaaacaaagggagatttgtaacaaaagaacggcaggttagtgttattatgaatgctgttgtggtaacgatgaagagagagagagagagagggtgatgttaatatttgtgatgtatagtgttgcattattgtgggcgtcattgcttatgaaagatttcctgttcaatggccagaccaggccatcgccccttactaagcgtcctctgcaacctttcagtattagtaagtgctgtgcctcaccgccacagaaggcattttgtcggcatttacgcggattgatggtggccttgttgtattccttcccctgaaagccctcattacataagctaaagggaagcagttccgcggagaatacttttttttttttaatctccgtgctctgctgtaatttctttttctttttctttttctttttgttatcttcactttgttccctctattgtaggaagaagaatgggggaaaaataaaaccattgttagtacaactgtgccattcttttgaaaatttttgacataggggtgagtcttttccttctacttgaatcatatataaagtgttagagcctttgctgaacactactagtccgttcgaagccatcatttgttatatgttatggtctttgtgttgcagtaattgcaatcagaaaagtacataaatactacgaatatacaagcgtacaccgataacaataacagtaacaaaaatttatattcagtaatgtccgagttttacagtttaactccaaaggataagtctggtaatccatatccattttctcaactagaaggtaaagttgtattgattgttaatgttgcctccaaatgtggtttcaccccacagtatgatggtttagaagagctatataaaaaatacaaggatcaaggtttagtcatccttggtttcccatgtaatcaatttggtcatcaagagccaggcacacaggaagaaattcaagagttttgcagactgaattatggtgtcacattcccaataatgcaaaagattgacgtcaatggagataacgaagatcctgtatatcgttatttgaaatcacaaaaggctggtatgttcggtttaacaagaataaaatggaattttgaaaaattcttaatcgataaaaagggtaatgttattgaaagattttcttctctaacaaaaccagtttctttagattctaagattgccgaattattaaaataatattaatattaataataaccaaacatataacatatatatatgctatctctttttagtaatggtatgtataattaattattcatatataacgatgttgtttactttttagctaagctttattcaagtttcaatcttttgttttcttcctcttcttctgtcataatctctttacgaatacgtttaccgttttcgtcctcttgttccattctttgttttatttcgtcatttaatattatacctttattgaattctttctcaataatatttaataactggttccctcttttagctaactctggactctttttgctcctaaatgaataatttaacgtaaataatggactggaacggatttcttctcttactaaatcataaacatccggtctgtccaatccatatttgaacaacattaacaaaataaatctatcttcttcaatactaaaagttttcaaatttggcggatattttaatgttagttcagtcattggatggtcatattctgataatttacgacgtagggcttcttgttgtaatttggcagtctttaatttctcttcttcactatcgagatatttaagatacttttcaaaatcatcaaggtattccattttggaccaaaacattttagagtattcaataacttcttccaatgatttacctggtgtgagttcgttagcaatagcctggatgctatttctaccatattttgcacatgcactaataaactttcttaactcaatttttgtccaattggggaacccttctttctccaatttttctttcaaatcttcttcatcctttgataatggttgagcatttgcaatcatcaattttaacaagtttaataatttcaaattatcttcttcgtactcttcaccatcacgataactatcactaaagattgtcttaacgtcatctatatctgggttatatttgattttcttggctacccacatacgctctttctcataaataggtttcaactgaggtgattgaaattgatgagggaaaaataagtgaccacggggtatcctcgaatgagtcggtgtggtacccttgcctgagttcaaaacatctttataatatccatctacagaataattggtggttctttcacgttttgatgggtggatccacagtgggttgactatattcttttgtattttttttttgaaatctgtaccattccattcatatgcagaatcttgattgaatttttgtaaatcgtccagacctaaggattcgtatttagcgtttaatgattttgttttactttcagaacgagccaataactcatcaagatcaaaatcgtcattttcaagatcatcttcatctttaatagaagtattgccactgttattagtattattagtagtaatagtagtaacattttctgtcgatgttagtgttggagttgattctcttgtttcattttcatttttgaaaatatctgccgcaccatgttggatcatagataacaaagcatctttagaatcatttttgttctcttttttagattttctatatgtagttttattttgttgaatcactaattgatctagtctcaatttctgagtagccctttctaatattttctcttctactgaattatcagttaccattctgaacactttcacttgtttcttctgtccaattctgtgagctctgtccattgcttgtaaatctgcttgtgggttccaatcagaatcatataaaataactgtgtcagcagtggtcaaattgatacctaacccaccagcacgagtagttaaaagaaaaataaattttttagaatcaggcgcattatattcatcaatagcttggattcttacttcgtggtcagtagacccatcaattctacaatattcatatccacgaaaataacaataatcttccagaatgtctaacaatcttgacatttgactaaaaattaatacacgagatccactagccttcaatttagctaataatttgtccagtacttttaatttttctgaattgtaaatcaaatgttcgtctgttgtatatggtgggcctggttctgcaccatcaaataaatatgggtggttacaacatttccttaattgcattacaatattcaatagtcgggtctttgattctttattcccattagcaccattaacagcatctaggtctttctctaaaatctttctataccattttttttgcattgaagacataccaacgtataaatttacctctttctttggtaataatgatgtttctacgtcattctttatacggcgtaacaaaaatggctgtaaaacagtatgtaattgcttaactactttttcttgatcatcttcagtaacttctgatgaaaaccaatcgtcaaaatcttgtgaattcgaaaaaatatcaggtaataagaaatttaataatgcccataactcatgaagattgttctgtaatggtgtaccagtgatcaacaatctatttcttgaagtaaattctctaagcacttgggataataaggattcctcattcttgattctatgagcttcatcaataataatatattcccagtctaattttctaaatgaggatttctctctaataataatttcataggatgctatgacaacatcaaaatcacaagcaattaatttgtcttcaatcaactgatttctttcctctttattaccttgtaaaataaaagctttcacttctggggtccattttttaaactctcgtaaccaattatttaatgtagatttaggtgcaataacaaggaaagggccttttttcttttcaatgtatctcaaataacctaagaatgatattgtttgtaaagttttacctaaccccatctcatcagcaagaataccggctaatttatttttgtgaagggacactaaccagtttacaccttgaatttggtaatctctcagtttaccattaatgtaggctggtgaatctctaaattggaattcaataccctcatcatcatcactatcttcttcacgcaacaattccgcatcttcttctctttcacttttgcgtcttcttatatcatgatgactattacttttctttaaatcatcaccttttctctcttttaacacatctaagacctgtctgaatttaagatctttttgagctttattctctataaaatgtttaaacaaatgacttaatgataatagatgttcaaacctttgaactgtatttttaagatcaaagggtgaagtatctgtatatttcaacagataccgtttttgattagattccttggagtcctcaggaatatctatcttataaggtttcaatctatctaaatactcttggcttatgtactctggttccatttaaaatacttagtatgatatgaaaaaatctttttgagtcacctagtatagtattttcttgtttgtctctatctgtcacgtttaatttagtatcaattcggcttgtactattattttttttcttacagatccatacagtctttctgaatagattgctatcaaagtgttattctttctcagtagttattgtaacagaagtttgctattgattgtgtgtttggcatttatattatacaatcataattactttaaaaatctgcattagtattttgtgttaagattttttttttcgtaagtttgaatattttagatttttcgatggaattgaagtacatactagtggttgtgatattggaagcactgatgggctaaaaaagaagtatataattgataggtaaatggagtcatagagtggcagaatatatagtaagttattaaacggattatatcaaagtagagaaaagaaagaaacagaaagtgatgtctattaaggaatccaaagttttgtatcatgctactacaggattaccgccttgttgtttaaggatttttcgtaatcagtttgttttggtgggtacgtacgaactacataaggcaagtggagtcagaactggttcagtagatgtatatgatagtcagttgaatttgcttaaatcttatcctacaattggagctgttttagatttaaaaatgtccccattcgatgacaccttagtagtcactgcacattctactggtaacattatgctatggaggatagaatatgttaaagatggtattgaagatgctaacattccagtatttcttcgtcttcaaataatagggaatatacaattatttgatacaaatattttgatctccagtgtacatttttctccatcagatccaaaattagtttgtattactaatacttctggtgaatctgcaataacgaatattgaaattggtaaagaaattgaatctattataggccaagcagtaaccaattcatatgctagtattgatcaaaaactctttgtagcacaaggggaggagataaatatgatggacaccgtagtggaattatttgatgaatcacattcattagagtgttggactgcagaatttggccaactatccccatttgaaaatgttgtgtttactggtggtgatgatgctactattatggcacatgatctcagagtcaagaataagatatggagtaataatagaatccatgaagctggtgttgttggtattaagtgtgcatctaaaaattttagacattatagacctacttcaataattaccggatcatatgatgatcatataagatctttggacctcagaatgatgggtgatacgatttaccctggtaacaatgtacctgcaatgaaggtatcagaactaaatcttggtggtggagtatggagatttagtgaattgccagaatcattgaaaaagactcagccatcaaacaaagatacattgatggtctgttgtatgtatgatggtgcaaaagtggttactatggatgaggatgccaccgatcaaggatctgattacttccaggttcagcattatttgaaatctggacatgaatcaatgtgttatggtggtgactggtcttcgcaatttattgcaacctgttcattctatgataaatctttacagctatggaatccatgatttaatagacaatagaatataacaaagtgaactaaaataaaataatatataagtgatagatatgttccaattattcttttttctttacattatattgcttatttgttttgttgattattaaataattgccagtattgtagctcttatcataatttaatgagtagaaattatcagcagaatatgataagttgttaattctattataattactgttttcaatatttttactattattgctattgtaaatggtttctgtgaaagcgtgtatgcatatcactcttcacgggtcatcactattttatgtagaagaaaaatttcatagaaccatacattaaaactattggtatgtgattcaaccacaaaggctaatatattgtaacaggcaatgctaattatatattgaaatatagatatacatatatagaagtgcccagatttagaggaagaacattagatacaaccttattattttttacactcccattctagaatttagaaattatgccaccaaaagaaagaccacaaccaaagaaatggaagcctccaaagggccctaaaccaattcaacgtaagaataaaaatactattggattaggtagagccattcaaagtgctcgtaagcaagaaaatgtagttgaatatttacctgatggtgaaatgagattcacaacggacaagcacgaagcaaattgggtcaagttgagatctgtgactcaagaatctgcattggatgaatttttgagtactgctgaattggcaaataaagattttacagcagatagacattctaatgttaaaattattagaatggatagtaatatggatgctcgtacccagcctgttggtatgactaatgcacagaaggagaaattgaacgccaaacaaagagaacatgctaaggatttgattgttccaagaagaccctattgggatgaatttactactaaaacagaattgcaaagacaagaaggtgaagcatttttagaatggagaaggaagcttgctaatttacaggaatctaatgaggatttattactgacaccctttgaacgaaatattgaagtttggaaacaattatggagagtggtggaaagatcagatcttgttgttcagatcgtggatgcaagggatcctttgttgtttagatcagttgatttagaaagatatgtcaaagaaattgatgaaagaaaacaaaatttactgttggttaataaggctgatttattgactagaaaacaaagaattacatgggccaaatattttatttcaagaggaatctcatttacattttactctgctttgagagccaatcaattattagaattagaaaaggaaacctcagagtttgatcaagaaagaatggttcagattgatgatgaagtcaccgaagatgaagatattgatgaagaagttaaggagaagatttctattttaagtattgatcaattggaagagttatttttgactaaagcaccatcagaaccattaacagaaccattacctggtaaaaaacccatattgcagattggtttggttggttatccaaatgtcggtaagtcatctacaattaattctttagttggggctaagaaagtgtctgtttcatctactcctggtaagaccaagcactttcaaacaattatgttatcagattccgttatgttatgtgactgtcctggtttagtgtttccaaattttgcttataataaaggtgagttggtctgtaatggtgttttacccattgatcaattacgtgattatgttgggccatcaaatttggtagcacaaaggatacccaagtattatttggaggctatttatggtattcatattcaaactagaacaaaggaagaaggtggtgatggtgtgactccaactggtcaagaattattagttgcttatgctagagctcgtggttatatgacacaaggttttggttctgctgatgagtctcgtgctagtcgttatattttaaaggattatgtcaatggtaaattattgtatattaacccacctccacatatcgaagatgacactccatatactttggaagagtgtcgtgaatttaataaagatttatatacatttgataggctcccaaccaccaggaaagaacaaattagagaagcagcaaaagctaaaggtattgatgttgtcgatttagctcgtgatttaaaaagcttgacatttgctgctcatactggtggtacagataccaaggaagctatgtctgttacacatggcggtaaacaagctgcattgtataatgctgcagaggatttagataaggagtttttcaagatgaatagtattgaagggaaattgactgatccatttcatagacaaaatggtaatggtagcaattccaaaaaacataacaagaaaaacaagaaagcaagaaagaaggcacttatgatggcagattgaagtacatatgagtggtctgttttagttgcttacacgttattatctatgtcctatccatatattattattttttcatgatttggcatatttattgggattggctttcaaaataaggaaaaaagcaaagaaggcaagtaataaaagcacttgcatcaggatgagagacacatacgcgtatatacacatagcaatatatatatatacatttgtgtatatgtttatattattgatctttcgacgatttgaatgtatagttctgacattaaagtcctcagatttaatttttcaaggcttgggaacctgaacagtattcttattttaaaaggcagaagttatcctacaaattgaaaaaggtatttactttcctttttaggaaacatcgaaggaatttagtacaaaaaaataaaataattaggtcgtttctttttttttttttttgaaacatctattgttcaataaaaaattttcactctcctcttgtttcagaagaaaacaatactgtttctcaagattgagtttctgttgtgtgatttttttggttattatttccaaaaaaaaaaaaataaaaaaaaaataaaaaaaaataaaattttgtctgtatataaagatcaaaagtcaagaaaactcgctttacaacctgaaaattggctattagacacgttctctattctttgcgaaaattttttacaccttttgttatgctaaaaggaaagtgtgggcttcttctttattcaattcaatatgttcaatttgaaagagttaaatggagtctgatatgatgttatggttaaatgtagtaacttttgcgagagttcttctcgtctgttaacattcaattataatttcattctttctttacataaagtttaattcttttatagatcacccctatgcatggagagttacttatgagttagccctagaatagaatatacacgcctttttcgctaacaatggctgattttcccacagcacatggtttgatagtaggtgggcgaaaatttgttttcctctttttttatatatgtttaatagagttttcttaattatataataatttgtgcctttacagatagctctattcggatacaaattttgtaataatgtacacaaaggatgttatatttttataaatatggaagtatttgtagtcgtttatttatatgaaagggatttcaatgcttttttttttgctttcattttcttttacgaaggttcattgaacgtcaatcatcactgtatctttggtattctgcggttcttcaaattctcttgacttaccagctaataactctcttctgatttcaggcccaatatccttgtggcctctttggcggactgtctctaataagaaatccctttgatcttgagtaatatcgtttttataacgttgtgcaaatgtcaaaaatgctttatgccatattactggcaaaactctagttgcatcctcaccattactaccatcatcaaggattctgaattttatgaaatagaaaacacactcatctacagtttggtatggtaaagcgtatttcttgtctaagagaatctttataaaaacagttgtagcaggtgagaaaggtaaccttaataaataacttaatgcagctgcagaatgtaaagctggaactgaaattttggctagaacacttcctgcaattgtagcttcacgaatattacaaccagattccactaatgggaaaaggaatcccttgaagaatgcacttggtttatatagagatttcttaatagcacggtatatgtggtaattcaaagaatgattatcactcgtttcaatattctcacggaatctttccaaaagaaccatgttaataaatttctgtgcttctttcgcattcaagttagagacaaataattttgtagcttcatatacaatgtgtggggaccaggcttctggatttgtcacgtacaaaacatcttgccaatttttcaaagatggaatgactttaaataatttaggcaacttaccatgggtccaagtggttaaaatggcaccaacagtagtataggctctaataactttttctggtagttctacaccatcaataggtcttcttccaccattagttccaaaatcattaggggatgctgaactattgttattattatcttccatatcaaaatcgttctgagctaattcattctctttttctctaatagtagccataattttatcagctaagttgtaactgccccctaaagaattataatcttgagatcttttgaaatattgttcgaacatggcagcatctttttcatcaatttctaccatttcttcttcatcttcaaaataatcaccttcaggttcaaaatctgatatattctcatcttgatattcttcatcttcttcttctatgtcactctcattgtagttaatttgtttaaacctggcattgtctggattaattttatttctttctgcatcttcttcttctgcaatttcatcctgctgttcttttgctaactgtaagatctttctagaggttttagcatccacatattcttcaacttcatcttcatcatcttttgtattctgtgtcttttgtttgatctttttaagtgcaccttgagcggtgttcagatccttcatcaaaggatcatgtctctgctttctgctcttagaactagtagctttccccatactttattctgttatttatatttttctttttttatgagttatttatttattttttctgtagtataagtattctggattggtatgggttctaaactaccttaacactctgtatataaagaatatattctgatcactagcatttaatagttaaattgtatttctttctttaaattagtgctcatcgcaaagattttaaagtttttacaaatattgggggaaaaaaaaagatttttctttgaaaattttccttttaattcaaggtttttttttctgagagtagaagaaattttaatgatttttgatttcaataagctggtgttcgaatcattcataaatacaataagtcaaaacatctggtttttataaatgattgcacatgagtttatacttgttaaaatttcattaaattttttatcaactgaaaataaaaagtatacgcatatatatgtgtagataaataaatatttgtcatgtagttttactaagattttaactgtagtcttacgtgaaaaggtattaatttgcagtagaatccatcctaactttaaaattatgctctagcaagtagtttttgacatcattaactgtatattcccctctatggaacataccagcaccaagacatgcgtcagctttagttttactaaatgcttctgcaaaatgtgctggtttaccagcaccactggatgcaataacaggaatcttaccagcaaccttagcatgatcaatcaattctaaatcatatccagtatttgatccatctttatcaatacaattcaaaagaatttctcctgcaccaagggcttcacaagcttgaatcaattcccaaacacctaaatctcttgtctctcttccacccttaatggtacactgataccagcaccatgtacgtccttgtgcgtcaggatatttactttggaaggttttattctttgtatcatttggactgttcacatatactctctttggatctacggagataactacagcttgtgcaccatatgctttggaaattgtctctattggagaagatccatcgccttttttaccattagcataatatttttctgcagcataaacagcatcggtaccaatagagattttatcggcacctgacttaaaatatagacttgctacatctaaagctggaattcttgtaccatccacatcaataatatctttaataccaccacctacagtaaatggaacaaagacggttttcgcagcgagtcttaaaacttccaacattggagcatctcttaatggacagtctctgaaagaagtgatattcaagaatgttacttcatcagcaccttgctcgtagtatctttgtgctaattcgacgggcttacccagatttctaacattattatttttgctatccttttcacgtacatcgtattgatcacctttagtgacaactaaatcaccttggtcatttgttcttacgtctaaacatgcaattattcttcttgttaaaccatagttactgtaatcgttggtcaattgtaatttttgttcttcagtatattctggcaatggaacggttttcttttgttgaataaaattatcgattattgataatccagcagatccagatttttctggatggaattgagtagcaaaaatattatccttagaaattgcagcaataaaagtctcatcaccgtattttgttttagctaaattccaaccattttctcttaatttagcctctaagcttggatcattcaacattgctgcataagaatgaacaaaataataacgtttatatgaatctattccgtagaatagggaatctgatggaatcacactgttccaaccgatttcagggacgggtttatttaaatcattaaattttgataaggtcatattgatatagttcaaccctttactggatggactttctacagacccactaaacatggcttgtaaacctacacatatccccattataggttttcctgattgaatatattgtctaatggcaggttcaaaaccacgactgaaaagattatcgacaaaatggccgtaattacctacaccaggtaagattaatctctctggattggatttaactaattgatcggcagttttaaccaattcaacttggtaaccaagatgatggatggcgttggttagtgattgtaagttaccactttcaacatcaataacgtggacagtagccttagacatttggatggtttggttttcggtctattttgtggtagctgttaaaaaaatgtactctgtcttgttgtcttctcttttcatgtattcccgtatgagttaataaactggtggtagtttaaatatgcatgaggggtatatgactcactcttcaaataagcagttttttttagcaatatcttgacatttgcacgaatttggaatttttgccgttttgatattttttccatggagatacttagaagtttagattagataaggttggactaaacatagatgattcaagatttaaagctgagaatagtcctagattggtgatcatattattttgataaatacttgagccagtatatatatatatataattgtttaaagataacaaatgttaaggcttagaattgaaatgagtaagggacataaaaacaaagtaaagaaattaaaatggaagatactatatatatatatgtatgtatgtgtgtatgtataaatatgttcctacgtatatttgttattatatacagaataagttaaaattatttcttcaaagtagctcttctttgtctaacagcttcagccaattttcttaagactgagtcggtagtctcccaacttatacaagcatcggtaatagaaacaccatatttcaaagcagctttaccacctggtacaacgggttggttaccttcaaacaagttagattcaatcataacaccagtgatagcagtttcaccgttagcgatttgttcacaaacaacatcgttaacctttggttggtttctgaagtccttgtttgagttaccgtgggagtagtcaatcattaaaccgttggcatcctttggtaaggcggccttagcttcagcgacagacttggcatcgtagttggtacctttcttaccacctctcaagatgacgaaacagtgttcgttacctttagtagtggtaatagcagcaacaccgtgttttgtgacacccatgaagtggtgggagtgagaagcagcttgacaagcgtcgatagcgacggttaaagtaccgtcggtaccattcttgaacccaattgggaaggaaagaccagaggctaattctctatgtagttgggattcggtggttcttgcaccgatagcaccgaaggataacaaatcagacaaatattgtggagagatggtgtctagcatttcggaaccgataggcaaacctaaggaagtcaagttaacgaacaactgtctagcggattgtaaacctttgttgatattgaaggtgttattgacgtcaggatcgttgatcaaacccttccagccaacagtggttcttggtttttccaagtatgctctcatgatgatacaaaggtcatcttttaattcgtcggataattgtttcaatttagtggcgtactcttgagcagcatctaaatcgtggatggagcatggaccgacaataaccaagattctgtcgtctttacctgtgatgatatcaatagcttcttttctaccttttttagcagtctcaagacatttctgggtagcaggaatttgggcctgtaaaagagcaggagatactaaaggatcgtaaccaagaattctgacatcttcactagcttcagttggggtagctttatcattagcatcgaacattggagtatgggacatttttcttttttctaaaggtttatctgtatatgtttatatgtgtatatttatgtgtattataagtaaagggttatgcaattcctaacaatttatcgaaataatcagttatgcaaaataatgacacctgatattttttttgtcgatggtaatgttcacgaagaaggattgaaaagaaataataaagaggacaagaaagaaattgaaagattaaaagaacggtaggaaagagcagaaaagaaactgcgttgcaagtagctatgagtcttacagacgaacagaggcgttaacgaattttacaggttctaatatatagaaacatatataggattgcggaaatgcaggtaggagggaaagtagcaaacgtcggtgacaatttaactatcattgagaatgagaaaaggaaaagcgagttggccagtgtccatagttaacaaacaataaagagtaagagagaaaacggaggacagagctgtgggaagaacgagcattagagaagaggggaaaagaaaagatcgagagtgagtccaaattttttacaggaaacaaatattattgactcattgagagatggaaagggaggaagggatagataggaaaaaaaattttttttttatttctctattttttcaaattcgatgaagtaaacaaatagaatgaaatgaattggaaaataaaaaagaaaaagaaaagaaaaaggagatggagatggagaaatccctactaataacgaaatagatgagaatgacgtgggtgataaaatcacgatcgaattggcttaattctattcaattaattgtctaattgatttgaacaacacgtatatacacatatatacacatatatacagacatttttttcttcttgatcttccacataaccttaaagtaaatgagacagaggattgaaaaaaaaaaaataaagaaaaaataaaggtgagcgtagagatgaggggaaaaattgtattttgtttattttttgttttcgaattgtttcctttttttcctttagacttgcttactaactcaattactcagcaaatagcttgtggactagaacaatttttttgaacaattgctgcgtatgtaatgaccacgagctcagttgtctggtctaataatttcatttcagggatgactcatttattcaagaataaatcttgattttagttgcaattttgacggcgggggataaaaagattagaggcaggaaatcacatcactattgacggtatctttttagaatttttttaaaaaagaaaaaaaaggaagaaaaagtttttaaaaatttttcacaaccctagtacagattaacctatgtgtctattttttttattatcaattgaaccctaacttaaaataattatgtcagttcaagagacttaaagtattggttttcttgtttcgttctttttttgctaatttgtaaagcttagttgttttgtcctgagaattttttttgtccctggaattttcttttttttttttctcaaggaaaggaggaacaggtgaggtacccctgttgcgatcttacgggccggcgggaaaggggggaagggaaaaaaaaccggagacaaatatttgtgcctttcttataacggacatacaaacccaagaatgaaatgagagcatgtatgtcgtattgtgtataacacccatacagcacgccatatgtgcacgttcggaacaaccttccgaaggattttcacaatgtgttcaacttacacaatttgtatttctgtcaataacactatatcttttcctaagagagataagaagaaaaaaattattaaagctacaaatatatcgatcaatactgatgatcaaaaggatcgtaacaattcttttaaaaaaaaaaaaaaaaaaattaaataaaataaaataaccggaaaacacatatatttatatttatatacccatatacaagaagaatatatggtcccacggagttataactcctgctacattatcgtaattaaaaggtcctattaagatattcaattgccataatctcttttgtttcctattctagaataggaaacaaaattgtgtcacagagtgtggttctctttgtgttgtcttattttactactgtctatgatcttgagatagagataatgacatcaaaattgcaaaatattttggttgattcatttaattctttaccaattaggtattttatttgagatctattcattgttttgatataatttgctaatttattaatgttattttgtttttttaagactttttttattcttgtgaagtttctttgtttctctctttctctctcttatacaatatataggattttgaacagattaatattctggacacaatatgtgcatattgtatttttcttttgttttaacaatcatcacaaccgttgcatatttgaaaacgtcgggaatttttctgtgtttttctgttcttttttttttttccttttgttttgccggataattgactcggatagatcttgcttaaacgtgtgtattgttcgttttgtctgataatgtgactctaacgattaaaaggtctttttttttttctctcgtcttatttcccctccctcttccttcttctcaccatcacacatcgttgtgcctctttctttcttctttcttttttcttttttcacccgtcttttctttaatgtcactcttttttctctttttatttatttttttttttacttttcttttttgtttatttttgctttaattccatcgacaaattatgaaggcttattattattgttattattatagtgatagtttaataatattatagtatacttattatagatacaatatgacattggacagtacattttttgtatatatacatataagtgacacaaattattacttcacttgcatgtctcttctatatcttataaaagtatgtttctataggttatccaactctttacagtaaattgtccgtacgggtccttcctttcttcttgctagcttagtcagcctttttgtcttttttttttttcttttctctttggtaattgttttcttggtctagaagtatacgagtattcacttttatttatatgcatatatatccatatttatatacatatacatataaacaccaccatatacttatatcaatatccgtacttatacttacttttgtatggtggatcatagtcataagttctctatttcattttaacttaagcacatattacattacagtcgattattaagagcattatcatcatgaataaccaggtgcaattgccctcgattcagaatttattgaattctttaaatcatgatgataataaaatagattctaagataaatattattaatatcaatatcactaataataataataatagtaatagtaataatagtaatagtaataatattcctatatttttacctgatccatttaaaaataaaatagatattaatagacaaaataaggatccttctaatgatatacagactttaatacccctaccgtctatcaataccatgtcttcatttaaaccttcctctggctcctcctcctccattgctaacaataataaacagtctataccatactcagcaaattcttttacttcagtatcattgcaacaatacccatcagttccaagaattaatcctgaaaagaaaagtatcacagcaattcaatctattatatctaataccatcactgctggaattaattctaacactatggctactactaaagatagaaatgattctaatgaaattaaaggaactatctatagtaaaagcagtagtcgaaaaattgtcactgcaaaaactatcccatgtaagataaattacgaaaaagatggtttgaaaattatctcgaggaaacattgtcgttataatctacccaaggattgcgtgacgattcttaacgactggttaatgaaccatttacataatccatatcctacagcacaagaaaagagggatttgttgattaagacggggcttactaagattcaattgtcgaattggtttatcaatcaaagaagaagaaagatttttagcgggtactattccatggctaaatctatttctgacgagaaagggaacaatgatctaccttgtgatgaagttaaagtacctttaacaaagaggaaaaaattgatggatagaattgacgaattaaaacaattgatgggtgaagaatcttcctaatatattgattgattggactattaaatagattatagatggatatatatatatatatatatatatatatatatatagattggacttatgttactataaagataaataaatgaataaatactattgtcattatagtctttttctttattccccatttgttttcgtttcatttgtttgtcccttcagaaaagagtttccaacttaaatacagatttgttatccactatatatctttttatttaatttaaatttatagtaattaggtatgtatgtattgagatattagaatatctctaagtcttaggataaaatcacttcttgtttttatatctttcgtgtggaacaaaagttttatgtattcttttcccatacattggatcttcacaattaattaaatacaatagtctgtttagttttttaatattattgtactggagttacttgactcttcaaaacagtatttctaaaccctctatcatttttcttcaaaatattattttatatatttgatagcagtaattagacattttattgttttttttttaaatgttaaataagttggtgagattgggttaaaaagaagttctaatcccttgatgttttatttttattaaaatctattcgattattataaaattttctttttttgtcttttgtcaagtataaaaataaaatttgtatgttttaacttttgtacaattattttttcttgttagattttagtgaaaaggattggtttaatcaagtgtaatatatgttttttagaaatccaggcttggtattagaaacttgagtattttgaagaaaatgaaaaagatttgcttctattagcaaataattttctattatttaggaaagtttattaccacagactttctttttgttataggaaattatatggtaaagtttacttctttttctaactgaaatactgtagtaaatatacaattggctatatctattgcggatgttcaatactgggcgtaaatttgtagacactactatatagaagtgatttgtactatttcttttatattagtgtgaacaggttagtatttatataatgataattagtattgtttttgtttgaattttattttattttataattttttttaatgtacagttatgataagaattggttgttatattgttattttcatatgtatatgttgaaaatttatgtgttttatttttgattaaaggatgttcctcgattatttaaatataaaagggttaactattaaaatataaaaaaaaatagattagattaaaaatttcatattaacaaaatcttacttcctagatattaaattcaagaagatattcttatttagtatatttgcttttataagatcaatgccataatatcaactgaaattagcttgtgtgaataatgctactgtctgattaaaaacatgtgtaatgcgtagtatacagctagttatatatttcacatttcaatagatttatgaaaattaaaacagcaataatcatgaaatttttattattaataaggaatatataaataggtaagtccatttgtttattttcaatctgtttggagaaattgtaatgtttttttattcaatttctatatattattataaatttttgttatttagaaaaatattaagagatatttttctttaatgaatatataaaatgattaaaatatgttttaagaatatttataagatagtttatagtgaggtaacacaataaattaaaaagatatattaaaatactttttaaccagattaattcctattttgaagtaattatcattttaataggcatatcttaatgaatattccaaatctatatgtcttaattttttgaatgattttggtttcttattatcattccctgtgtactaatgttagtattaatctttaaagtaaattgtgaatactggaagttgggttaatttttattgattcatccttatgtatttaatctatcctattctagtgtgttgtgttttgaatattgaatgtaaaagatattagttatgtctgattaaatacttatattaataatatcacaaatgtttttgtttatttttttagtatatactgtgtatttttttattgaaaccgaattaacattttttcagcaaaaccctatttttctgcatatttctcttaaaaaaaatttatgaattattttctaatatgatgttagaaatatcaaatgaatttactaattacttctttttcaataacttcaaataaattttaacaaaatttaataaacatgtgtgaaaataggggttttatcactatctttttcaaaagaattatttttaatttagttattttagatattatactgtactaaaaaatacagaaaatattttatttatcaccaaaagtatttttttgatattcaaggaaatgaaaaatttacaccgtaaagtataacaaatatcattcctattcttagcaggaactgttgtagaatagagaagttattaccatcaagattacataagatcctgaatgaatctagaactatttattgttttaataagccatacacatgccacaacattagatgctgcataataaagagattggattacataagattttggcaaatctagaatttacctattgttttaataagtcctacgtgtattactaatcaccatgattagagaattggggagcagttctaatccactagtgcacctaaattaatgtaataaattttagggtttggagcaccaagcttgttaatgtacaaatctgaataatcgatcgagctccagaaacatataaaaggacaacgttttctggagataaaagatcatcttccataaccgtttcttgtaaataatttatatattatatatgaacaaaaaagagaacaacaagcaagtaacaagttaagtgactttgaataaatatattagctcgatataaaccgttcaatatataagaccgttttagtaattgtattatcgattatagttgattactgtctcgattacttgaataactattaatactatttgtgcttccctggaatacacaaagaatttcaccacctcataatccaacaaggacaacagttgcaggcgcaagtggtttagtggtaaaatccaacgttgccatcgttgggcccccggttcgattccgggcttgcgcatttctttttcgcttatgaaaatattgttttttttttttttaaaaagatccacataaaataagggtagtaagtttaaaaagaagatggaaattataaaacctgtttgtcttttaacaaaaaacttctaaactgctactgtgacattcaacagataatatcgactttttatgttcagataaattagttagtctgaaaattttacaaaatacatttaaatatgattattatagacggtattaaatatgcatgtgagagttgtattagaggtcatcgtgcgacaaagtgcacacattcagataggaagcttgtgcctgtgaaaaaacagggaagaccttctacaacatgtcatcattgtaaatcattaagggaggaaaaaaacatcaatccttcaggaagttgtaaatgtgcaaagatagaaaaggaaggtgggttatttgaaatagatgacactataggagataggtgtttctgcgtcataggtcatgaatgcacttgtcattcaaaaagaaaaaaatccaacatattaaccaatcaggagggtagaaaatatctgacaaatattaacaattctcctttctatacaccgctatcaacaccatcttccataattgatgaaccattttctgaagatgtttttaatgtaaaggaagaccaaacactgtcatgttgtatgccatcaattgaaaatgtaaaaataagccttgatcctgaacccaatctccccactattgctgatggtacaacattgctagatcagcttattcctgattgttgttcatcaaggcctatagtttcaaattcagatataccactgtcgtcacatcaagcaaatatggagacaacaacttttaattctaaaaaaaaaagcaaatgttgtcaaaactcttcatgccaatctaataacactgatacattgaactttttaaatgacactttcttagacaaaatgttcaactccacagctttaacaaatcaatttattgaaaatgagtaatattgaaaactaaattgaatctatatttccagtaattacataagactattatttaggtatcgttttacttaattttcatactctcccgttttatttatcttattcgtatatagaaacaaatacagccaaattttgtatattcaacctaaattcatattttttagtgcatttatgatttcgtgtacatcaacttgcttttcttttaccttagaatacgcattctcatcatttaaatatatcgacaacctttcatccgttatctctaacaaagatttttcatcatcatgctgcaaagataaaagtctaattatatattctaaaagtgctatcgatcttgatgctggaagttgattagaaatacaagtatctaaagcatccttgaattgatctacaacattattttgatcttcttcctcctcctccttttcaacttcttcctgttcttcattttcactatcgggtagctcaggttcatcataaccacctaatgcataccatttaatcaactggtttccatcagatatagcatctgattcagtctttaaaatcaaaacaggactgtcgttctcttctaattttaacaatctacctgagacattgaagactaatttttttatttgttcaatttttaatacaaattcatgatcttggaattcatcttcattatgatatctaccatcattgaaatcttgcttaatagtgataatatagttatattcacctatcttggaagtgtttattctttttatcactaaattggctcttttcatagtttccttccaaataattggattatcaatatttgatgaattataaaatatggtgtaaagggtcacctcaaaactaggacccacattagggtttaccttataaactttgttattttccacaatataattggatgcattcaatagcaaactaggtgatatttttttggataaagtggaacttaaatttgttccagaagttgttaacgataaatttataaaaggtgttacattttctatttgttttaataaatttgtcatgtatgtttccaatgattttatttttactgaatgtaactttttatttgtagaattttcctgaatgtcttcaaacaactcattcactttgttatcaaattcatcgatgtctcttcttaacccctttgtcaaatttaatgtatattgcagatttgtattacctttagatgccactaattttattaaatctaacgcaaaagaaacaatttctattctagtttctaattgagaccgcaatatttctaacttattggcatcttcctgtgggatctgcacgataaacttactaacacttttaatagcataagatgatgcaattgatatccctgatttgatagcaaaagaaactgcttgagagccagctttagccaaaaattcatccattgaaatttcaaataaagtacaaaaagagcaataaactcaaccaactaaatattaaagtatatcttactttaaccttcctcccaatgtgtcaactactattaatacagctatagtttttacccccgtattttccacttatctctttatcttagatctcaagacatttttcacttaaacagtttttctttaaatgttaataaggtctttcagaaaaaaaatatacactaaaaaaatagataagacttaataatggataagatgaagatacacaccgctcaaaaaccaaaaaaagaacaccatatctatatatttttattttttatatctattcacctatctacttatatagaagcgagaacaagaatagttaatgcactgaaaaaaagctaggtttaaagaacaatactagaggagaaagggggtgaagaaacaggtgagaatacaaatatttgattcaatgcgaaatgtattgaaatgcatagctgatatcattgtaatgatattcattttgtaataaatggtcattagtcttttgtaaagaatcgtgatcaatatggttccacgtggtagcatcaccatataacattgtatttgatctaatcttttgttttccctttggagtacatcttttacaatggaaagtctcatgtgtctcacaatttgtgtctttgttgaaaagaaataattttcttaaatcatcaacactaaacaatctttccacatcatcttttgaatctaccacacatgaacttaaactcattttcatcgattgtctttggtaaattttttcttcaattgaaccagttgtgataaatctgtaaataaaacaatccttcttttgcccatctctccaaacacgagccaacgcttgttgatctgcggcagggttccagtcaggatccattaggatcaatctattagcaccaattaaattaataccacaaccacctgcttttgaacttaataaaaagataaattcctgaccatttggatcgttaaatcgatctaccaacttttgtcttttattaattgtcattgtcccatccaatctaacaacaccatatcttttatatctacacattttctcgatgagatccaaagtatgcgtgtaatttgatataataacaatcttatcatccgattctgtgtgaatcttatgtaaaaatcgttccagaatagaaaatttccctgacaattccgtattaacattcctacgattactgccatttgtattcaataattcatctggggtatcatctatacctaattctttttcccaatctagtagatttggatgattacatagtttcttcaaaataccaatagctcttagcggggcactacctgttccagtgccaatattactagagtttgtatcattgagagagttgttttgttcattcattttaatcattttttccatatcccttgacgatagcaattttgaatatagtgtcaattgaataggtttcaaatttacaaatataacatgttcatatttacaaggtaaatatttggataaaatatcgttcgtacgtctaataataaattttgacacaatctcagacagtttaagtaattgttgtttacctctttcaacctctttatcagtagcgtcagcgtctctactcaataagattggaatttcaaaatttttcctaaactgtaaccttgtacccaataatccaggattagcaaaatttaaaagagcaaaatattctgtcaaatcattttgtattggcgtacctgataagataattcttctggaacaattaatattatttaatgcagtgtaagtcaaggaactacaatttttcagtctatgaccctcatcagccaaaagtagtcccacagggcaattattcaattcttgaacgtttctacgtagggtttcgtaagatattattaatacaggtttaacaatatttctacctcttgctttaccccattggttaattgcttgagctacagaatcgttccccattaaagagagtgatgattttttcccatctatggcaagcggggaaattgtacctggacctaaccatttgaccaattcattagcccaattgttgactaatgaggatggacatacaatgatacatttatcgatcatacttttaccttgtggaccttgttttaaaagggtccacattagcgttatacattgtaaagtcttacctagacccatttcatctgccatgatacaaccatatgaatttgaaggcttcttagaaacagactcagaaggtggtgtgtcttcattgtctgtatgcatctcttgttcttttgtattttcaacctcaaagtcctggtcattatctaacgtttcattgggatcgatagacttcaacaaattttcttgttctaaataatctttcatagctaaccctgttatacacctatacaagaatttgacaccctctacttgatgtggtctgagaatctttgctatcctgggatctataacaactggcacattggggaatttcttttgtgaagaagacgacgacgacgacgaagccaataattcggttaatggtttatttctgagtccattagacataaattttggatgtataaaatgctttttcttttgtgtattaagctcttgagaagatgctgataaagctggctctttattctttgaattttgctgctgctgctgctgctgttgttgttgttgctgttgttgctcaatattaaaatcttgatgatcggttaccatatcaccgtcaacagagggatcatataagacgattgcaaactcatcagtgggatcatgtaaaggtcttggttctgatatgattttattctttgtacctaatgttagcgatagagaatgtctttgtatataaccatgtatagggacagtgaaagaacgtttcaacattttttcgatactacttatcctggaaggctcattcagcagtcgtacagaggataatgcgtctactctttttcttgccttgtttatatagagagaaggtttatcaatagaataatcttgttcgtttgtatcattgttatctgaatattctttacaggatactgtggtggatcttttccttaagtagtagtgcgagttagccaatttgtttatcttgtaaggaactttaaatggtttggataggatgttgtaggacttattcggatccaattgttttggtactcttcttggtctttgaccacagcctattccatttggtggtctatctggtaattttctggccatcttataatatatataatatataatatatgatacatatatatatatctgtgtgcgtatgtgtatgtgtatgtgtatgtatgtattgttatgtagttatttaataacccttttgtttgtatcttattatgtattcattatgttttccccatagataaatgaattcccaaccatataattctaatttctcgatcttcttcacacaaacaaaagaaggagatctatatttttcccacaccacaaacacgcagatttttgaggttttgtttttcgtgtttatttatttacaccatcaaacgcgaaacatagcagactccgatccaaaatgaacacaactacaatcgcaatcgaaggcatgaaagtaaatactgaactattcccagctcccatttatattaatccactcatagaaagggagtttgagataggttcgaagatatgtcaagaagagtatatatatatgtgtaagatatcaaggcttattataattgcaaataaaaagagaagaaaaaagccagaaaagaagagaaaggatacgtccctatgggtgtatgtgttattgtgcatgataacatcatcgtatcagtcaatcatcctctcccttgtccccgttccttcttttatgctcttatttgtataacttccaatatttctctcttactgttttaaaataaaagacctctctttttccgccatgcaaatgaaaagagaaaaaaaaaaaaaagaaaattggcggagtctgtcaggcacacccatacacctccgctgatgacaacgccctcttttgttgttctgtttttttttttttgttgttttgttctcttcgtcgaatctctacaaactccggactgcaggaaaaaaccagccctaaacggcttgggaaaaacagacatgtaaaaggaaatatacaatataacaggtacatagacgtattttgaaagagcaaaaaggggcaaaagagagagagagaaaaatagaaaggttatgagaagaaggcatattaggaaacttgaatattattagctccaaggagacacctgtatctgtgtatgggaatgtaagacaattattctctatctctactcatcgctaccactattgtatacatatctgtgagtgagtgagagtgagagtgagagtgagagtgagagtgaaagtgaaagtgggtgtgtaatttctggcctcacttttcataactgctgctgtcaccagttatattcactccacaccacttttttttttcttttctttcttttctttattcctccttgttggacaaccttcctaaacgtccacccaaccggaagatgagtgacaacaaacacaaaaaaatagaaaaaaaaaaagcagccaaaagcaaaacaaaggaaaaaacagaacaaaagaaaaacaaaagcaaaacaaaggaaaaacaaaacaaaataaaataaatcggtctttttctttttttcttttcttttctctttgtttgttatttattccgatctttaagatcacataaaatggaaaaaatatctataaatggacatcgcgcactcaaaaaatttttttttctctttatttcctcgaaagattcaatattctttcgcctacccacctatatatatatatatatatatacataagtgtatacgactaacttggtattctgtctattatatttccttgttctatctccttacacttgtacctttgctgcatataaacatattcgcatacacttatattcacacatttatatctctttacaaactattattataatctattacatcatagatacaatacaaaaaaataaaagacacaaaaaagaagtggtgtactattttctatttctatttctatttcttcttttttctttctttttttttttttaaacatatacttatattaatattatagaaaatttatttcttctcatcctaattttgttcttttctaagctctgcatatctatttacattcaaccacatattaattgcattttctttctttctttctttctttctttttatttttttcattttttttgatttggtgcctattgaaaaaaatattatgctttgatctgatattttacttatttgtaatataccatactacatcatgacaacaagttttttattagataactcagatagaaatagaccacctctattgctaccttctttatcgtcatcacacaattataataatatccccattggacctattggccccattgccccaattatcacaactacttatgataatacatcgtctgttattaatacagctgtaactaatatcaatatacttaccgacaacattaaaacggataatccaattgtttccaacaatccattggataatttggcaagattggcaactaacataccaaggttgtcaatgactaacgagggttccatcataaataaacctgccgattctaacaataccacatcaacctctccttcaaataatgggattcccactaacgcaactaccacaaccaccaaaagaaaaaagaaaagaaccaaaatactgtctaatgacgatatccttactccgccaccaaccaaaccaggtacaccatcaacatcaatagataccaataattcctattctatgaacaaccacaataataataatagcaataatggtgttgtcatggcttctacaggaagaaactcatatccttctaaatattatgaaaaattggctgaacaacaaggcacctcatcgaagaaacgccaaagaattggtccaagttgcgataaatgccgtctcaaaaaaattaagtgcaatgcatccatagagatcatcctaaaggattcaagaatcgtggggatgtttaatgaacatctacattataccttaacagatcaagatattgaaatgttcaataaaaactggagtcacctatttggtgtcaaattaccttacaccatttgtaatataccaataacaaaatccaacaataaatgtaataataactcctctttttcttcctccccttctccaaccgccgctgcaagtgatgatagccccagtactactcaagaacccgaatatcaagtcgttgttaaacacttggataaactaataattttccagtcttgcacatcatgtaataagaggaaatataaaaattccgaatctggtccaacatcatgtaagtttgcaagagggttttcacgtcctgatataaaccaattcaacaagattaaaatccatatgatatcacaaacctcctctgcttcctcttcaaacccttccatgcataaaaacatgccaatttacgacttaacaattaatgattatcaaaatgcaggcttccaattgataccattgcaataatagacatttaaatataaggtacacatacagttataaatacacagatatatataaacaataatatatagatatttatgtgttgtgtatctcttgtgtcctttaacgattattacactaaagtttataaaactaatttaattataaacattttcaaaatttgaattgttgctatgagtatcttattagtgaaatctagtgtccaaagactttgtacccaaagaaaatgaataatttttaataaaactagtataaaaaataataatgttataccatttcttattatgaaacttgtaccatttggtaaaagatagttgataaaatctacaatagggaataataccaaccaattgacattactatacccgataatactcaaaacagacacatattttattggcccatttgactttaacttgtatgacattaaaaaagaccctaacatatcaaataatataaatatccataacgtatgaaacattaaattaatatccttatttgaatcatgttccatttgaatcccctggattaattgtacagctattaattcaaaaaatgtcttagtaaccatcttcattaacgcacatgacataactaaccaagtaaacccataaaaatcctcaatttcatttaaatctttattcaaaattgtcaatctaactctcaaaagaaattctgtggaatgaaaatactgactataatagttcagtaatccagaatttaaaccacttctattaaccgtggtagttccattcgtactaagcacttgattattaactgcatgcgcctgttcaaatgaattttctaacaaatcctcttcatcatgaggaattgtaaaatcatcaacaccatctaatccatcatttacatatgtagacattgttctgttatttctgtatttaatatttaattgctatatatatatatatatatatatatatatttatcaatgatacttttcttctttcacttttggtttgacacttaatacaaacctatcaaaggagtatgctttacgcttccaactgtatgtctcgttagtaatacgtctcactataaaaaaagaatttcctcctttcaatagcttaatttttctcgaagactcttctttttgatcttattttcttccacttccctgaccgtaaaaaatgagatgttacaaataatgaaccatccaaaaattgaacgggtgcatttttcttgtaaattgttttttcatttattttttttggaaaaatttaaatttgatcgaatttttgcgatgccgaaaacatagtgaaaagaataaatatatggtaaattagtaatacagttctcactctctcgactagtgaatgcatgataagtatatttattatgaattttaaatatttattttctagatgaaatgaagttaaacaaaagagtgaattacaattagcaatattttatataccagacttcttctttttttctttatatattcttattatctttttttttttcttttttgcatttatatgataaaaagactgctgaaccgactaatgcatacaaaaatactaaaagttaatccaaaatcaattgaattttcaaaagattcatggttgaccggatccttacctaaaataaaagataaatctacagaagatgctatcaatgaagctgctaacataattaaaaatacagatgataatgtagcattccctacagaaaccgtttatgggttagggggttcctcactaaatgataattctgtcagtaatatatataaagctaaaaatagaccaaatgataatccgttaatatcacatatatcctctattgatcaattgaatagaaaaatatttaatgattacaaaagtggtccgaatatagatccattaagaaatattccgaaaatataccatggtttaatacagaaattatggccaggtccattgactatccttctacatgtccctgaatcttctgcgttgtctaagttgaccactgtgaatcaaccaacttttgcagtcagaatgccttccgatcctgtagctagagctttaattgcaatcagtgatacaccaattgctgcaccctctgctaatgcttcaacaaggccatctccaacaaaagcacaacatgtatggcatgatttacatggcaagatacctttaatcctagatggaggatcatgttctgtgggcgtggaatctactgttattgatggcttatgtacccctcctaaattactaagaccaggtggtctgacctacgaaaatattgtgtctttaggtggagatgaatggtctggctgtcaagtcgagacacatgcaaaaaaaaatgaacatgttagaactccaggaatgaaatataaacattattcaccgtctgcaagtgttatactactaatacctacatcaaaactcaataataacaccgataaagttaccctattagaaaaaataattaaagatcacggcaaaggttacaataaaattgccattctgactactcagcaattagataacataactgatcaatctgcttggttttcaaatgatcttattcaaacacatcaatttattataaagagactgggtatcaaaggtgaggagattcaagcaaacctattttctacactaagacaagtagatgaagaagataatgtagatttaattattgtagaaggaattaatgaagataaccaagggcttgcaataatgaatagactagaaaaagccgcggggggacattgtttaccgttttaaactagtacatattatatatatatatatatatatatctaatctattgcaaataattgaacgtgtctcatttcttattaaagtatacatataattagattctttttatatttgatttcatatgcgtatgaaggatgtaaattacaaaagagtatataaacatagagataataaaaatatagttcatttctatatttatttttctaaacgacagaatagaaatatgactcagcttgttttctatagtgatattttctcaattcatcaaaaataaaaacagaactactgattgccaataaaaacactagatccattaaacttaatgcttcagtcttaaagacattctggaaaaatggtatatagatagcacacatttgacctaacaaagataacccgactgctagattgaacattttgttagtaaaaaaaccaacttcaaaaatagatttggtagcgtgtctacatgctaaggcattaaacatatcaaaaaatacaaaacatgtgaaagtcattgtagtgtctcttgccgttactttaccatcttctgccatctctttaacaaacacgtaggttgtaccaaaaataatacataatgctgtaccaattaatctttttaaaacaatattggttaaaatcttttcagaacgctttctaggaggctttttcattacttcatgatcaactggttctacaccaagcgattgtgctggtggaccatccatcaatatattgatccaaagaatttgcattgcattcaaggggttaggtagattaaatgttgtagacaatgcaatcaaagatagagcagccacggatgtggataattgaaaagttaagaagctttggatattattgaatatacctttaccttcttcaatggctgtcaatatagtgctgaaatcatcatctgttaacaccatatcagaggcttctttagcaacatctgtacccattttacccatagaaacaccaatatcagccaattttaaagctggggcatcattaacaccatcaccagtcatagccactatatcacccctctttctcaatgcacgaacaatgctcaatttgtgttccggtgtagcccttgcaaaaacgtttacatgatctataacattagctaattggtcatcagtcatttcatctaattctacacctgatataacagatgattttggatcaacaacaggaataccaatttgccttgcaatattaattgcagtattaacagaatcaccagtaatcataataacatgaacaccaccttgtaacaattgttcaatagctggttttacagtaggtcttggaggatcttgcataccaatcaacccactgaacaccaaattggagattatttcttcagtcaatttttcttccttattcccgtcttttaaagtcaattgagcaagtgccaggacacgtaaaccttctgaagctaaggtgttagcacaatccattatagtttttctatcttcctcagctaacttttcgaatttcccattctctttaacatacatattagaacgttccaatattctttcaaatgcacctttaacataaattgtaactttaccattactatccatcatttttgtaaccatgaattttctttttgaattaaatggaacttcatctaactttgtcattgtgtttctaatgtccttcattccaaatgtttgcaattgctccagtaaggcaatatcggttggattacccaagtatttcatatgctcattagaaaatactgcattattacacaaattaccaataatcaaagtattcttaacatcttcagtcaaataatttttcaaagagttcttatttttaatgacatttaacatattagttttattggacatactaccaagacaccacattttggaaatagtcatatgattggacgttaaggtccctgtcttatctgaacaaatcacattcacagaacctaaagtctctacacttggtaaccttctaacaatggcctttcttctagccattcttaatacaccaagggccaaggtaacggtgacaataataggcaaaccttctggaatggcagcaacagctaaagaaactgaaatttggaacatttctaaccaagaacgaccttgcagaataccgatcaaacatatgaacccaataatcacaaaactacaaagagacaaatctttacctaatttatccatagaatgttgtaatggagtctttggtttttcaatattattcatcatctcaaaaactgcgccaaaagaagtatttttaccagtgccaacaacaatacctttaccatgcccttctttgaccagagtccccatgtatgcaatacatgttctatcggcaactggaataacggaaccagaataagattcagctgaaatatgtttggcagatttatgcactggttccgtttcaccagtcaaactggattcatcaatcgataattcataagtctcaactaatcttacgtcagcagggattctatcaccgattctgaaatgaactaaatctcctggaactaatgtggatgctaaagtctttgcttctttaccaaaccttactaaatggcactcttctggaaccaatttattcaaggcttctaaagatttttcggatttatattcttgaacaaaacccaccgttacaacaatcacaactgccaaagtaatacttactgcatcgtcaaagttacccataagcgcagaaacaacagctgatccaattaatagtaggattagtctatcctcaataaacgtttctaaaaacttcttgaacaaactttcatctgattcagaagtgacttcattggcaccatagattgctcttcttcgttccacatcatccatcgataacaaccccttttgtagatcagtgttcaatttctgaatagtctcttgaattgataatgtacaatactctaaagatgcattgggttgtgataatgcttcgctagtagcgtttaacaaatctaaattatcttctgaaggttctgattcctgtcctccattattaaaaaaacttgtaaatggattatcactcattgtaggagtgggtgcttaataatgactatctatattaagtcttttatgatttaatattatcttaatgatccaaatcaaaatgaaaaaaaagtactagtgaaacgctatacttgtatatacgacgaaactagaagagaacacaacagaaacaaggactttgaagataaatgaacaggtacgttgatccctttctgaagaaactaggtgagacactcaagataatttagtctctaccggtatagtatatcagcaagaacttgctgctaactgagaataacaattaatacatgttaattgaagataaatattattcaaaaagttggaatttcagtgcgaattacattttattttttgtcaatttttttgtttactcaaatcacaattttcttttcttttttttttttttttttttttttcatcttcaaatttcgaaattgctataaaatttaaaaaagagataaaacaatagaaaaagtggcttattttctattgttttagacataattgttctatatattatataaagcaatcagagattccattagtaatccctgagtgagcccctgtccaatgctgcaggtgacaaagtcttaacacaactcttcacctttcccctcttcatgtataagtgcctcctgcaaacaattttttcaaaggatcgtttactcgatgaatgttcgaagcaaaaaacaaaaacaaaaacaaaaaaatcatttttcaatagcttcgaccaattttattcgagacaaaaatccttttatgtgggatgtatgggtgtaatcacgtgaactttttaccaagcaaatttgtagaagaacaatatagatatttgggctaatcagtagtagatacttactcgtagaaggagaacttcttaaattgtactaaatataatttacagtgtattcttcaacaaaagcgattcacatagtattataaagtgaacaagatattccatttgatatgttgtaatatgagatggtgagattctttgtgtattccagggaagcgcaaataattttaatagttattcaaataatcgagacagtaatcaattataggcgataatataattactaaaccgatcttatatattgaacggcttttatcgagctaatatatttgttcgaagttacttgacttgttacttgcttgttgttctatttatatttatatataatatataaattctttacaagaaaaagttatggaagttggttctttatcttcagaaaatattgtccttttatatgttctctggagctggatcaattattcagattcgtacattaacgagcttagtgatccaaaccctaaaatttattacactaattcaggtacactagtgaattagtaactgtaccccaattcgctagttataatatttgggtgcactactggtaaacagcacaattattatggccattagtaatacatgtgtgacttattaaaacaatagataattccagattcattcagaatcgtatgtaatcttgttggtgatgactcctctattatacaacatgatttgttgtaatataatgtggtcagattttttagtattatttggggaagtgctagaaatatcaaacggataatttattaataattgagaccataattgatacaatcggtaatgcaattattaatacggtcttatatattaacgactataccgagcttatataattatgctatttgcttattgtattctgcgttcgatgctggttgattgttgcgttgttcttctatatataattgttggaaaatgagagtttattactgccatttccataagaattatttttaattagtctttctgtatattatgtggtgtacgaatataccataatatatggaaaaccattttatttttcaccaaatatgtttttcagagatttgaagagaaataaaaaaaactttaaaagaaaacttaaagtaaataaaagaatgtatactgaatacactatataataagtatatacatgtatttagtacaaaacacaacaagtatctataacttaataatgtcttccattaccatggatgctaagggcttcaaattccaacaataatatatataaattatgtataagagaggagtgacagaagatagttccatctacagaagatgttatccttttatatgttttttggaactcgatcaactattcaacttgatatattgatgaattagtaatccatatctttattattagttacaataatataatcgaagatcatagaacatttaggacaatagattatggtggcgcagtaacagagatgtgtgaacacgctggacaaaacaggtggcaaatatatactctgtacactaggtggcaaacggacacgttgtatttaaaacacaatagataaccttaaattcagatagaatcttacataatcttgatgatgttacctctctattatacaacatgatttgttgtggaatagaatagttataaccatcaagattacataagatcctgaatgaatctagaaccaattagtgtattaataagccatacatgtgctacaacattagatgctgcataataaaaagattggattacataagatcttggtaaatctagaatttacctattgttttattaagtcccacgtgtattactaatcaccatgattagagaattgggatgcagttctaatccagtagtgcacctaaattaatataataaattttagggtttgaatcagtcaagtcattaatgtagtaatctgaataatcgatcgagctccagaaaacatataaaaggacaacgttttcaggagataaaagatcatcttccataatcgtttcttgtaaataatttatatattatgtataaacaaaatagaacaagcaagtaacaaatcaagtaacttcgaataagtacattagctcgatataagccgcttaatatataagaccgttttagtaattatactatcgactatagttgattactgtctcgattatttgaattactattaatattatttgcgcttccctggaatacacaaagaacttcaccacaccatactacaacaactggtagcgtttatttcatcatgtcctcgaataatttaaatatgaacgaatttttagacgctattgatgcatctacggctacagaacatcataccaccgcaccaaccactactcctgctccaactactaacctaaccgctgaccctacttctgctcctgctccagtcccatccgattccaaatactacagtactgctccaatgcgcttctctggtcgctatgatttatttaaactaccagatttccttgttactgtcgaagcacaactttatgctcgaaacctccaaacagatgtggatcgtatagctttttttggccgaaacttaactggacccgctgctcaatggtatgtccaatggatccgtaatcatgaccaacattcctatgaacaattccttgtggattttaaaaataagtttattggtatgatcgaccctcatgccatcctcaatgcgttccaacgcttgaaggaagctaccgttggcattgacgcttataatcaaaagttttcacaactattagctttgatgccttcaaacatttggactcccaagggagaattacttttttattatcgcggtcttactcctgatactgcccgtatggtagctctagctcgccctaccactgttgatgctgctatggaagctgccagtgaaacagtttccatcaccaaccgttcatttcctaccttcaccacctatgatatggatggagacatccatatgaccgctgctcttaacccagtccctatggactctactactgatcatcatcctcaagttgctgctgtttatcgttcacacggaagagggggcagaaagggaaatcacaaatcttcccaagcaaacaaacaaccaattaagcgtccctctcgtcaatattgtattgatcatggtttatgtttctattgttacaagccattacaccgctacagtgactgccctaaccgtaaggcgagcagtcccaaatgaaaaacaattctacaacaaaaccgtcacactagctcccatcgtgtccgctccccatccactcgtaggcaacagttgccaaattaaaatgtttattaaagaaaaacctgtcaatgttttagtggatactggttcccccacatcatttattagagccgatattgctgacaacctcaagttaacacgttctaccgctccgccattccgttttagaggtgttgtatcatccgaatcgtcatacactaacgaatccaccgaaattttacttgaactcgatgacataaaaattaaaacacccgtatacataactgatgctattacttttgaaatcataataggacacccgattatatcatctcacccgctgctccacaagatattaaataacaagaaaccggtccctgaatacattgtatccgtacttaccgagaatgataccgaagaattagatgttgaaaatgctgctgctgtgtttgctataaagatttctgaaacagatacagatgatcgatttgataaactacctcgctggttaaaagagaaatattctgctacagtccgcgatgatttaccacctaagaaattcgctgaacctccaaaggttgaacacgagatcgaaattaagccgggtgcacgcctgcctagaagacagccatatcagacgacaccaaaaatagaacaagagataaacctgatcgttgccgaccttctcgaaaagaaattcattgtaccctccaagtcaccctgtagttcaccagtggttctagttaaaaagaaagatggtacatatcgtttatgtgtggactacagagctctaaatactgtgacaatcaaagacccgtttccattacctagaatcgacaacctattggccaagattggctcttcaaccattttttcaactttggacctccactcagggtatcaccaaatacctatgaaaatggacgatcgtttcaaaaccgcttttgttactcctaatggaaagtatgaatataccgtcatgccgtttggtctcgttaatgctccaagcacgtttgctcgttatatggctgatttatttagggacttaccatatgtctgtgtttacctcgacgatattttaattcactcccgttccgttgatgaacattggaaacatatagacatcgtattgcaaaggttaactcaagaaggattaattgtaaaaaagaaaaaatgtaactttgccgctaaatctgttgaatttttgggatacactatctctgctaataaaatccaaccgttgatctcgaaatgtgcagctatagaacaatttcccactcccagaacaattaaagaagctcaaagatttttgggtatgataaactattatagacgctttataccccgctgctctcacatccaacaaccgattcaggattacatacatggtaaaagtaagtggtcgacggatcaagatgagagctttaacacattaaagtcacacctaatctcaaacccaatattagtctcctttaaacacgatggtcattacagattaacaaccgacgcttcaaagaatggattaggtgctgtactcgaagaagtgaatgagcaaggaaaaattctcggggtcgtgggttatttttcaaaaactttacaaggcgctcaaaaaaattactctgctggagatcttgaactcctagccattgtcgaagccttatcacattttaaatatatgcttcatggcatgcattttatattgagaacagaccatattagtttactaacggcacaaaagaacaaagaaccctctcgtagagtaattaaatggttaaatgaattagccgaatatgattttaaactagaatacttagcaggtccaaagaatgtagtagctgatgctatttccagagcagattacaatattgctgctatcgaaaatgctgccgtcacattagatccgaaaaattggtacgaagaatacctagccgacccattatgtgctgcctgttttgtttatattaccaaacttgatacaaaagacttacccatttgcaactcatcattgttcaagaaatatatgaagaaattgaacttatcaagaacctttcgccattgttttacaattaatgacaatattatttactttaaagaacgctatgttgttcccgacgctaaacgaaatgaagtccttcgaatatatcacgaccatggcctttatggtggtcatttcggttcaaccgttacatacaataaaattgcaagtcgttattattggccaaaattacaccactctgttaatgaatatgtctcttcctgtatacaatgccagttgattaaatctcatcgccctaatagacagggcttattgatgccttctgaagttcccgaaggtcgatggttaaatattagcatagattttgtatctggtttacctaaatcagaacaaggtaacgacatgattatggttgtagtcgacatgttttcaaaaagaactcacttaattgctggtagttacccatttgatactacttccgttattaatgctttattccgttatattttcgcttaccatggatttccatattccattacttcagatagagaccctcgttttacctctacagaataccaagaaatggcaaaaaggttgaatataaaattgaaaatgtccacagcaaatcacccacaaacagatggtcaaactgaacgtacaatacagatccttaataggttattaaagacttatactggtaacaatcatagacaatgggatcgtttacttcctcacatcgaattcgtctataactctactcccaatcgcgtaaccaagacagctccttttgaagtagatattggatacatccctaatgaaccaatcatagttacaggagatgctgtttcttcccgtcatgattcaacacaagaactagccacaaagttgaaagcacttactttacgcacaaaagatttcttaactgagaatcagatcaacatggaagttacacataacaaagggaggaaggaagttacctttgaaattggtgattttgtactgctacatcgtgatgcttattttaagagaggtcaatatctaaagctacaacccatatacgttggcccatttaaggtagttaagaaaataaatgacaatgcttacgaattagatttaccttcgatgaaaaagactcacagagttattaatgttgaaaaactaaaaccgttaaaacgtagaaaagaccgctatccaaaagatccgcctaatactgctgccgaaaggaaattaagagtacatgaaattattaatgtagtcggttacgataaagataacaaagtgttttattgtcatatggaagatgttgatccgactattacagtagaatatccagtagaagaatttaacttactcccaacaaatattggtcaatctttaattgacaatttcgtacaattatggaaacaaggttcccaagagagagaggaagatgttgtggaatagaatagttataaccatcaagattacataagatcctgaatgaatctagaaccaattagtgtattaataagccttacatgtgctacaacattagatgctgcataataaaaagattggattacataagatcttggcaaatctagaatttacctattgttttattaagtcccacgtgtattactaatcaccatgattagagaattgggatgcagttctaatccagtagtgcacctaaattaatataataaattttagggtttgaatcagtcaagtcattaatgtagtaatctgaataatcgatcgagctccagaaaacatataaaaggacaacgttttcaggagataaaagatcatcttccataaccgtttcttgtaaataatttatatattatgtatgaacaaaaggagaataacaagcaagtaacaagtcaagtaacttcgaataagtacattagctcgatataagccgcttaatatataagaccgtttagtaattatactatcgactatagttgattactgtctcgattatttgaattactattaatattatttgcgcttccctggaatacacaaaggacttcaccacaccatactacaacatgatttcaatgggtaaggccttgttggcgcaatcggtagcgcgtatgactcttaatcataaggttaggggttcgagccccctacagggctttttttgcttgggtaatctgcttatttctgtttcatataagtgcgctatttaactttaattgtcatagaggaagacataacattagaatcgtaagtttccataacgaaagatacaataaatggttcttacttgctatcctttctatataatttatgaatacattctatataaggtgtggtttagctaaaaaaataagctgccatagataatgttttttaaaacataaaagagtaagaacgtcgtcatcgatcaaagtatttttgcaagactctctacagtaataccaagattgattaaaccaaacggtgtcttaatatttgtttattatatagtattacatacaatagttcaacaaaataaggtagtcatgtggtactaaactgagatagataaaactagttataggcttgaaattataagtaaaaaaaaagactaaaataaacagatgatatccaaattgtatgattctctttcttgttcgtctatcaatgacatcttctaatctttttcaaagtaaaatttccatttaccgttgtattccataactatcaaaccatagataagtttcccttaggtaatagcatgttacaaaattttctttttataaaagtaattgaaatgatatctaacagaaatgttttataccatgaaatattatatacaccctgtacctttctatctttatattaataatacaatgtcgtggcaagtaacattttctgctgcaagaatttgaaaatggtcattagagtgctacgacacttaccagagtaaaagatcatcaagggagaggatagaggtgcaccacaggctacaattcttcaaaattactgtcattctctgttgatactcataacttgctttgttttagctccaattttatagaattatctatctagtaattttttcctacattcacttttacttgagggtaacataccgaaagttatatacgtttctttagcaatactaaatgagttggtaattaggaacatatcaatgtgaatcattcaagactaacatacaacagaaaacagcgttgaggaccatttaaaaagatattatataaaatgtcaagcaatagtaatgattttcaaataagacgaattacaactaaagatttccaacaggtcaaagaagccttaaattttttaactgaagtggagccattaagccaagaaaaatttgacaaagttttagaatactggtccacctataaactacctgaatgtggttctcctgtatacaactgctttgttatagttcctgtcaatgacaatggtgacgaaacaggtgaagtagctgctgtaggaactatcttcattgaacaaaaattgattcatggtggtgcattaactggtcatatcgaggacattgctgtaaatgctaagttccaaggcaagaaactaggcaagaaattaatcaattacctatcacaatatggtttaaacaatggctgttacaaagtgatcctggattgtgaagaaaagaacatcggattctacgaaaaatgtaacttcgatcaacatggtgttgaaatgcaaatcagaaaataattcacgcttacttattatttatatcttctatcttttattttctttctttcttttttttttaaatctatttatacattatcatatatatgtatattttctagtttttctcttttacacaactctatattactgtatctaatggttccattgctatgatagaattccctcttactacagtctgttgacccaaattgttatggataggcgagccttgactattacttagctgtataatttcgatggcatcctcaagaacaacattcaaaaatagatcataaccttttaatacacctgcaattttccttttagcatttattgttaacatgacctttttatccatatatttttttaattctggagtcgaaaccatattgaaacccccttcctataatcttttttaaattgattgagttctctcctagctataagtaaagataataacaacgcaatattagtcagctttttctttttagaaaacttatatatatacctatgtaatgctatactgttctttctttatttttattttgttccagcctttttttacatttctttttttcttttatctctcctattgactatatatatatatttacaaatttttcatttaaaattacttaaaaaataatctaatttatgttagaggacattttattcaaaatcaaaagattatatagagtgaaatcggctaacaaagagacaatatataactctaaacaagcaaacgttttaacgaaatacaaaaaattaacatatacacatgtatatgcatttgtgtaagtatatattaattagaatttatgtatcatagattaatattcaaccaatttagattgattttatctttacctacaacttttttgacgttgtagtttttttttgtattatttgtattattagaattcgtattacgttgtctcttcttaattgtatcggtcttcaaggataatggcctcatcaccccatgcaacttcaaaaataacccacatgcgttgcataaagaattaccttcaggaccctttctccagagcggtgtattgtatgtttcacaattagaacatttagtcagtgcagaagaagaattgctgttattattacgtgttgctgtccgtcttttcgttgtcgatataacagctgctccaaatttcttttgttttaatagatcgttcgtctcaggtaaagaaatcgatatcgtttcctcattatttaaaattgcgggatcgttaaacactactgctttggtagttgaggtcaagggtacagatggagtaggaataaaactggttgttggagttggagttaagcttgatggtgtcatatactggaaaatgaaaggtgaagatatatgatcttgatcgaaactattagaataatgaagcatatgattgggtaaagattgtggtatatccataggtaagggagtcactaaagtctcatgtactgaagaaggaagatcttctgtaaacatatcaaactcgttatctctagtgatgaaattatcatcatctataaaaaaatttgagtttgtatcaactattgaatgagcattattgatgaaaatgttattattattttcatgattacttgaataaccattattgtaattaatattactgaacttttgtcggtttaaaagagggtattccgaattggcatcaaactgatttaaaacagaagactcttgaaaaaggaacgaattttctaccctatatcgatcaattagagatattttattgccgccatttacacaattttgttttaatctaactttatatcttctccaagttagatttaatattctattactatgattcaaattttgtttagctttactatataattgaaaaatgtccatatcttccttcaaccaattatccacgtttaaatttgttgtaggtgcaatatctctatcaatcaatttattatggtttttatcattactattaataacaacattaatattattaataatatgctcattgtgattattattatgattattattataattattattgttatttttaaagacatttaaattatttacatttaaagattgatcttgatgactattcatgaaagaatcgaataacagagtttgatcagaatgcctcatacttattagttgaaaataacttatcctaatatggtattccctagttttactttttatagtaacagacttttgattaatgttatagataaaataagatgaagagtgataataataataatggtactagaaagaagaagaaaaaaaacaaaataagacctaattattttttttatttggtttttacgtttagctgtttacttttctattaattaaagaaataaaatacgaacaaatacaattatggtttgcatatatatagtttcttatgagtcttaaccaaaatgaatgtgcatccatatattcaaccaacagttgaaaaggaaaaaacaaaaaagaaaaaacataaacccaggggaatgtgtcgccaaataagattaacaagacaaaacaaagagaagaaaaatgagtcttgtgctaagaataaaattattgttattattcttataattactgtcatattcttttattttctttcttaatctatttttttttattctttttgcattgaagtacagaaacttaatttaaaaaagaaaaaaataaacaaataaaaaaacaccgacgtaaaactgtgtcaaaccaacaatatattacatcgaaaataagatattgtttcaataaagagaataaaaagtctacaaacaaatgagaggagaaaataactgagttagaagagaaagaaagtgtgagacgtcgaaatagaatgaaaagacagaaagataaaaaaaaaagaatatgtggttgacagttgcagatcttacctgataagtaatcttatctaatcttgtccacaaccactccttgagaagttaaaataaaacaaaaaaaaacaattattatggtcttatctaaaaattttcctaaaatgaacataataacaactgtggttgtttttgttacaaatgacattgtttggagaaaaagaaaggcgattatgtaattgttgacacaacaaaacagtcctcgaacaatgaattttccccttagggataagatagtcggatattatcatgaacatttcaagagaattttaagaaattataaacaaaatttcaatcttgagtcttaacatttcccgatacgtttgtttatatttttgaccaatccttgaaatgaaaatggatcttatctttcgattcgacgcattgtacgagtgcataataatgttggaaaaatggtgttcctttggaaaaaaaacattcagaagcggaaagttacaaactaaaaaacaagacgcgtataacaccgccacgagaaaaattaggcaaggagacattatcctgggattttccaatgcccataattaggtggagttaggatttacataacgaagacatctttgaaccatccatttacatcactaactatattgacataagtcaatggtaacttgtctttttttatgtcttcattcttttctttttataaaaataattaggcttgtcacagatataatagaatagtggtaaagacttagatataattttaccaggatagctggtagtcaatttatcatagtcaatctttttatacactcaatgttgattaagcaattgtttatagaatatatatatatatatatatatatttgttcaggctaatatcattaagactgcaataaaaaattcgtaactttctcgttaaaggtattttgttttatagaactttctatgtgaaggaatatttcaagaatatatacccgtcaatagtagtattattttcaaaagacaaattgcaccgcataaatgctgttttaatcttgtttttttttttgatctttttatttccagcaggaaaacccagaccttttttcccgattctcataaaacaaaaaagagactaaaaaaatcaagaaggaaaaaaaatagtctatgtcaattttctcaatgttataattttttttattattgcatacgttgtggatcgtgcaagatgctgacacaaccaggcaaacacatgaaatatggaaggttcatgaaagtgaacataatgaggcaaaaagaaaagacagtcaaaatcatcttgtaaaagtttcaatttttactcttttctctcttctacatcatcactgtaagataatgggatgacttcaaagtaaaattaaattttcaagtgttcatttttcaatatacttttcattctttttaattataagaaaataaaaaaaaagaaattaaagaggttaaggtttaaaacaacgaaaaacgaaaaaaaaaaagaaaaaatcaaacataaattaaagtaaaagaagtagaaaataagtgacttcgtggccattaaacaccattataattgattttagttttcgtgctagtataaatcagtttatttagcatatcgataacgtttatgtaaaaaaaaaaaatataaacaatcaaaaggaaggagatatactaaaagaagtttgaaataatgaatacaatagaatcgttagataaagaatacaacgaattattgcagaatgataagcaattacaatttgcttcacaagcgataaaaaattataaaaaagatattgaaaaccttaaacaatataaagacactgctaataatcacagtactacaactatcacaacacacaatcttaatacaaaagcaagtttgtttcctaagaaaagacatgtaattaatatagacgatatatcaaagattaactacgacgtaattagaaatactccaggtaatatttcaatactggattcacccaattatgaagatattgacgctattaaagcacgatattacagatcaagtctacacaagatgcatgatcaattcatagataccttgaatgataggtttttacaaaagtcctttagttcaagttcacaaaatagtgaaaacaaaagtgaagaagaacaattgtcattagatgaacaactctttatcctttataaaatacagcaaaatctgataaaagattacaaacaaatacaacgtgaacagcaaaaatggttccaattgaaagaattactattagacgcaaatatacaattggatctttatagtaaaaatgaatggggtcctgacaaattgaatgagcaaaataataacagcaatcgcaaatccacatcttctactaacacttttagaaatccaagaaaaaggcaaagaataagcaaataattatcaaaaattaaacaaaaaggaagagaataaagtagcataggcatttcagtagactcttagtggacactaactgctgacatcaacactatatagatgtatatatgtatatatacatgtgcaatgttaactttcatcacacattcaatataactttttcattgagataccacaagagatattattcaaaatattgtatagatgcataattgctttttttgaagaacttctccgggtaactcactttctttcttttttattctaaaactgcgagaaatctcaaaaaagaaacaatttttttttgttttctactttgttttattcatctcaattttctcgaagaatcgctgaaaaatatttttttcatcttgttacttcgaaagtttatatagacaagtatgactatttttggactctctatttctgtttataggtagatcttaattgagaccattattctcagtgattgttaccccttggtataacgtaggaagcaagcaatacatcagtctataaggaatctcataacaatgtcccaattccaactagatattttgaagaagctagatgaattaaatgaaatcaaatctactttatctgttttcccagatattaaatctcaagatgttttatccgctttgaactctctaaaagctcattctaaattagattacactaaatctgagactatctattacgatttgactaatgaggggaaagatatcgtcaaaaatggatctcatgaagtcaaattagttgaattaattaataaattgggtaaattacaaataaaggatgttatgactcagttaggcccacaaaatggtaaagtaggccaagctcgtgctttcaagaatggttggattaaaaagactcctgaaaatgaactagtcttatctgaaaaaatcgctagtggtaatgaagacataacctcccaattgactgatgagactaaagatcaattaattgccattcaaaatccagctaatcaattagatgctaaaactattaacgatttaaagaagagaaaattagtaactccaagaaaagaaactgattttcatgttgtaaagggccctgatttttcacttgaattgactaaattagaaactgatttaacttccgatatgatcgctacaaactcatacaaggatttgaaattcaaaccatataatttcaactcacaaggtgtgccaccacaatctggtgctttgcatccattaaacaaagttagagaagaatttagacaaattttcttctctatgggttttactgaaatgccaactaacaaatacgtagaaactgggttctggaattttgacactcttttcgttccacaacaacatcctgctcgtgatttacaagatactttttatattaaagatccatctactgctgatttacccgaggataaaacatacatggaaaatatcaaggcagttcatgaaaatggtaagtttgactcaattggttaccgttatacttggaaggaaactgaatgccaaaaattagttttgagaactcatacgactgctgtctccgcaaacatgttacaccaattggcaaaagatccaaaaccaactagattattctcgatcgatcgtgttttccgtaatgaagctgtcgatgctacccatttagctgaattccatcaagttgaaggtgtcctagctgattataacattactttaggtgatttaatcaaatttatggaagaattctttgccaaaatgggtgttactggtttgagattcaaaccaacttacaatccatacactgaaccatccatggaaattttttcgtggcatgaaggtttaggcaagtgggttgaaattggtaactctggtatgttcagaccagaaatgttagaaagtatgggtcttccaagaaatttgagagtccttggatggggtttatctttagaaagacctactatgattaaatataaggttcaaaatatcagagaattgttaggtcacaaggtttctttagatttcattgaaaacaatcctgcagctagactagatgaagatttatacgattaaatagaaaatcaaaataaagaaaagaagaataaattataattgttacgagatctattcaacaccacctacattgtgtataaacttatagatatatatatataaataaatatgacattttcatacgtttgtatattaacctaatgaattgagtatctgatataataaagtgtaaaaaattattgaaagatgttttttatacttttcattcacttccaaacaatgaagcttatatattgtatatttttagttcaaaggcatcatcagaaaaaatcaaatgtgccggtgcacgcactaatattattagaaaagagtagttttgttaaattatattaaattatatacatactacatcatttatacaatcttctattatgttctattatattacagatccatacaatttttaagttctaataaagaaaaccggaaacctttatagtaagaacttaaacttttatgggtatcatagttgtatttctttaatacccaaaagcattcatctaaagcaaggccctctttcaaacctatttatattaaattccataacttcttacgcctattaatttggcgtgaaaaatccatatctttatttctccagaaggaaccatatttagcctccaattcagcaatagatatattacgcttcaaaattttcttcattaattttaaatcgtatccaatctttcttaaatttaacatataatcatgtataaaatcatatgaccagccagaaggaatcctatcatattcttcccataaatgttcaatcgatctaggccttttcataagtatcacaccacaattaggcaatgaatgtcggtgcaacaaggaggatatacttatattagacttgtctaagcactcttctctagtttcattatcatgcataggagcttttgagttttgatactcagatactttctgattaaaaacaaaattattattaataacataattagataatgtgcttaaaatatttttaaaccgactaattaatccatcttcctaccatttataatataactgtgaataaggagtaatttcaactgatgttctattactaggtggtagcaagccctccaaatttttatatattttaaatagatagtgtattatagtccctgtagttgtttctgccgaattgtctgaatttaaatctacgttattatcaatattgctttcttctatttctggtacaaagttaaaagtgttcctttcgttatccaattctgtataatgttaaaaagtatcatctaaatttacatgataaaaaaacgtctctaataacctcctcctgtacaacattataaattgacatgttaccattgctattactccaataactagaaaatatctaacaattatgtttgaaagataaataaaaaatactaatccaatctctttttttttgctttcgaataataaatggactttaactatggttcatctctggttaataatctatacataagacactttctattatatactacattgttcttattggcttttacagctaaatgcagaagaaagacagtaccaactgattaaaaagacaaatacaaaaaagctggaatattacacataatgataacaatatatttctatcaattatacttgccacaatttcacaaatcactttatcaagctacacatttttttaatatttttacattataaagttatccaatatcctatcatagcgccaaagtgatcgacatttgttacttaaacttttcaagcaattatacatgtgtgtcatttttacacaattagtaattacactgtaacacccaaataatttttttgtaatatttcgacgaaaaaagaaaattagccaaacagggaaagatagcctttctaaagaatttccgaatattcaaaaaagatcaaatagttaacaagaaagaaagcttcataattaaacagaaactttataaagtaattatgtacaattattctttaagatattattagcaccattaaacaccgtagaatttaatagcttaattattaaatatattaaaaccagtttaatagtaaactgtatttaatcaatatatattttgtcataatattaattctatgccttctaacagaaaaattctttacaagcttaacattagtcaaaaaaataggtgaattactttataatacacaagcaaaatttgaaggaaactaaatgttcaatttcattcgttgtgacttaaaacgactgactttaattggatttccttctgcgtcaattggctctagttccatctctgacgaagaattattattgtgaaaatgtatattgtgatcaccaaagagttgtctagattcttcttgtagtttcggtaacagtgtttcctttaacttatgatagtctaaattaatagcatgctgtaaattataggcattcaaaccataatcatcatttataatactgattgtatttttctcaactccacaataatcttcagggatatttctctcatggatttcatctgccatgattttaaaatcatcaaaatcattatcatcttttagttcttcactagtacctaatctaataggattatttttttggaaaacttttataacatccttcagagattcaacttgtctattataatttgtaaaatcatccagtttttctaagacagtacccggatgctcttccaagtcatcatcatacaatcctagtgtatatgccttaaccatatcatctaaattaccatttagtgcactataatccacatttgcaatatgtacatcatcttcgcttttgcccatctgcaagattgcatttgcaatttcctctggaaatacatcctgaattttctctgctttctcctctactttctcatcttctattgactccttaacattcttactaatattatcatttttatcttttaaaagtttaactattttaggctcttcctgcttcggtttatccagaaatgtttctacttcttcatatgcatctaacatctctgcggtaactaatgactgcttagcttttaactttatacgaggtctttgtaatgaagccatcttttttctaaatattgacaatttacccttattttctttgtatgattgcgtagtttcagcatcagttccgcattgttttatatttttatcattcgatgtcttgaaattatcgaccatactctctataactggttcacttataatctcattgacactattactctctatattattattttcaacactattattatcaataggtgattcatcaatgatatctttctctataatatttgtcataacaacatctttctcaattatgtcgctaatcactggcctctctattattgtattttctaaaattttatctgaactgctagatatttcttcgataacatctttttctataatatcacttgagacaaatgcctcatcattcttattatcatttctactacattcatattgatttattgattttgctttatcaaaattttttccaagcatattctttttaaatctagatacacgttttggttttgctgttgtattttcttgataaacaccattgttatcagttgacatattagccgtttccacagcattagaatatttatcatgtatttcttcagatcccttaatcccaagcatacttgcaaaaaggtcattatcgaaatcattaacgttaggattatttgtatcatctatcatatcttcatctctaactccaactaaatttgaatacattagttgttgcatagatgggaatatattatgtgtttgttttttagtttcttctttaaagttttctacttcatggatatccaattgagcagcaaaaccaacacttttcttactctttttccctttattctcatttttcactgacccgtcattcttatttacatctatcccagtttttaaaatagatttaatttcaattttcttatcagctgatttttttaatgatttaagatttaatttcctagatggttgcatctcatcatctggatcgttatcattgacgggatttcgttgagctcttaatttagcaatttgttccataaaagaggattgaccggatgatccagggaccatcatcatatacccattaaacatataatcatcattatcgtagtcctcctcctcctcctcatcttctccattttctctcatattcaaacttcccatatattcatccaatttatcatagtcatattcgatatcatcctcatctaattcgccatcttcaagattatcttgttcctccatttgttgaactaaatcggcaaaggtataaataccatcagaatcaattttatttatatttgtattagcttctttcaaaatatcttccttattctcatttgtatttttagttaataatttacctcttaaatttgatgcaaattcatctttcctctccttgccctctttctgtatatctttagatactgtttgttcttttttggtggaatttgtaggccttatacttgaattaataatatttccatcgtcatctaattcttctctaatttccatcgtagggaattctgtatcaaattcttcaaagttatcttcaccttcatcaatattattagatacttccttcagattttgtaaagttgtttctgcttcttttatttttaacataaactgctcaatagcttcattcattaaacgcaatttatcattaacaaaatgtaagacctcatcgaaatccttttcaacataatattcataacccaaattcaaaaaacatttattagaagaaataatgacatcaccaagtatcaagcctttgacaccctcactgttaccactttcaccatcaccttcaagcgaaaggttatcattatctttattggacttaaaggttattaatctatcatgaatattattatattgtaattgctgttccaccaaaaaagcctttttattttgtaaattctttaaacttttttcaactgaagatattaaaaagtccacttgattatccattatctctagattatgttggactgtttaaactttttatccctcttaaatgattatacaaccaaatggctaacttagaaaacgtacaacataggaaataaaacaaaaagcattaaaaatctagatcaagttgccactttttcatgtatttgaaacccatcccgtctcatcgcatctcatctcatctcatctcatcaaatctcaaattttactgttacaaatcaaaattaaaaaaaaggaagatgaatattgaacttacatacatccatacaccatattacccggatattgcacgtgacttgagccctgaatcgaatcccttgcaatgccttttttttttttaacttcattttgataaaatcttgtttgaattttgggataatgacgggaaaaccagaaggaaggaaaaatttttttttcttttttttttttttttccttttttcgccacccgttcccctgtaaacaacgacgacgacgacaacgacaacgatagcaaacagtcagggaggagggaggtgagtgatccatgacaattagtatggataaacagtggtaatacctacacataaatataatagtaatgacaattcgctaccaataatatatatgtgcaatttatattcacttacagacaatataggtataatataagagccaaataaaaaaaaaagcaaatagaccacccatttcccaacccattgccaccgatcttcggttcctccaacaactctcctttccgatacgcgattggattattatattccaacctctttgtgattaatatacaagtaactaagaagacaaagtaaaacactgcatctataaatagactactgaaaaagaggttctcatgagcaatagtcattgttgtgttcaattgtagaatatacactcatatatagacacgcccatacacacatatacaccacaatatattattaccataccataccgcccagcgcattcaacatatattcatcgtttacgaaaaaacttaacgcattttaacttccagtccatcgtcccctcccctcttttttctttctttttttttttcttttttgtgttttttgtttttttcttccctgtaatttcgattctgtttagtcgtgtgaggtgatcgctgtattaccatggcaacgcggagcagtgccagtaccagtaataacaaaaacaataagaacaataaaagtgataataacaacaacaagaagaaaaatgaagtcctgaatagttccaatagtagtgcaaatataagcaataaaggtagtagccctgcagtcccaaacgttagtggaactgtattaaacacaaggtctaggcacagaaaaatctctgttaagcaaaaattaaagatatttttacccaatgatttgaaaaatttggagcaaaatgaattacaacaacgtgatgttgtcgatcatattgaaactggtgttgaaaagagtgaggagaaggaagttcatttacacagaatactaactcaacaaaagaaattcgattcacatgaaaacacaaatgatgatgataagacacagaataacgagaaggcttatatcccaacgccttctaccagaaaaggttgggatgaatttaactccttttatcatggaaactttattcagtcaaaaaatttcatcaaattttccgctactgtagaagattgttgtggtataagttataatatggatgaaacagatgatggatttttgaagaattataaccaaaaattagtagatagtagctctgattcggtatctaataaacaacctttaaacgaggatgaatttgaattattatgtgctacctttgaacatggtatcaaagaaagacaaccgtttttatcaatggacgcagagagcattctatcttttagtgaattaaagcccactttattaaaattgaactttgctaatcttggcctaaaagcaaaattagcccatgaactgaattattcaactgatgaaaagtttctaacacaatacgatccaacacaagtagacaatgtacgaccaattcaccaactgctggagatctatgggaatgatatctatgatcattggaaattaagaaaaatcgatgcaaatggtggtgaaattttcccacaactgaaatttgaaaaaccaggcgagagagaagaagtcgatccatatgtttgttttcgtagacgtgaagttagacatccaagaaaaacacgtagaattgatgtcattaatagccacaaactgaaattactgtacagagaattgcaacatgctaagaatatggctttgcttgtagctaaacgtgagctaagtgcgtataaattattacaaagtgaatctaaagttttggatgatagattgaagatcatatcattaaaaagatctttagatattagtggcgatgatgatgatttgattaatcataaaaggagacgtcctaatattttgacaatagaaagaagacaacagattgaaaaggaggaagctgaagcaatattaaagaagaatgctgagcttgcttctatacagtcagctactgctaaatcaactgattttgatgaacctttatctgtatctgccaataagcatgtcgataataataataaaaataataaaaaggtgtcatccacaaatctcgctgaaattgacgtcacagctacggctaccacttctgctacaacaaaacgtaatggcagaaacaaattaacaaaaaaacaactagagcagttagccaaatctggcgaaaaactaactaagcaacaattagaacaattacaaattcaatcatctgattctaaagttgaagtgaagtcaaaagcaccaacttcatctcaaaaaaaacaggagcaaaaatcccaacaacaacaaccctcaattgctacgcatgtgtatgtcaagttgccgtcatgtaagattcctgatattgttcttgatgatgttgatacaatattgaatcagaaggagaaaagtgcacgtagattcgtccatgatagaatggaaaaacggaaagttgaggatggtgatcaatactttaatcttacggatgatccatttaatccagtattcgatatcactttaccaaagaatgttgattctacaacagctccatttgcatcaattgcctcgtctaagttttcaattgataattcgtattatgtcccaaatcttgacgattatcttcaaggaaatacaaaagatattaatgctttcaataaagacggtgaaaagatagttaatgataacttatcgtacatcaaaaaagtagaaatttataatcctttccaaactcataatgagatttattcaagagagtatccagttaaatttagaagacggtacggtcgtaatcatatccagtatgttgatagaaagccaaattataactctactgaaatcagtaaggatgaaacaaatgaaatgatgaatcaattttttgactttgatgcaattgaggaagaaacgaacaaagttgatgagtatatcaatgtatatgagtctaaggccgatgagttaacaagattttatgaaaaatggaaatatgattctccattgaatgaatttggaagtaaattttcagagagcccatcgcatttgaatcaaatttcaaataaaacacaggtcattagattcggtactatgctagggacaaaatcatatgaacaattaagaaaagctactctaaaattccgtagagaatatatcaataatttgaaacaacatcagaaagtgattcaaaagcaacaactacaaaagatccaaactcttcccaaaaatgtatccaacttgaatcaaaaatccaatagcaattcaagacaaacatctaagacaccaagaataaagaatgaaagtaaagttcccagtatatctcaagaaaaagcaaataacgcataaatttaatcataacacatccatattaatactctttattagggccttttttctttctttgttctaactattactattaacactatactgcataaagactttttcatctcatgttgttattattactgtttgattttattgtaaatgtgtatttcatatatccatcaattccattttgagctacttttaacttgcaaaagtaccaaatctgtattattaagttatttgtttttatgaatatcaaccatctttaattcatcttattttaaaggacacataatttaaattattatattaatgtatcaattaccatatgttctttgtgacatatataaatattttttgcaactatcccttatatataaatataaataaaaaatatatagacaataacggcaagactttaatataatgttttcatgtacttatctattttttattctaacgaaataatacttactatggcattaaatgttaacaattgatagatttcaatattgatcgtctatttattttagaaattagcagcagtatagtatcacattatccaacttaacctagtatctttcatctttaatctttctttattgatcaattgttcttcttttgcaatacatgcaggtggatatctgcaaaaacaaacatcaacacttagaaaaagaatcaaaaaaataatttgcaggaatgaacaaaacttcttaacaaaaatatatgtgcccttgaagaaaagaaaagagacaaaaaataatacaaaagtagataggtgcaactccatcttgcactagtaactcgaaccggaaattagataggtggctttactattcctaatctcagctagtaagttgatgggctgatatgaaatgtggcgtagaaacattttttcaagagctttgagatctgttttagcaggttatagaagaataagtagtaaaaatagcaacaacagtcccacaaataaaagtaaccgtaactatgaagacagaaaattatatcatagtacttactatagcaaaaagtttagatttatatcttacattggcatattttttatatttttactgattctattgagcaaatgtttacaattttcagggcctgatgcgcaacaatgcagacccatttggatgtatccatcatatgctaaggtagatggatttgatacaagatttacacgattagctcataaataccatttatacctttatagagaacaagggaaagacaaagatcctctaaatggtaatgaaatccaattggacggaatacctgctcttttcatccctggaaatgccggaagttttaaacaagctcgttcaattgctgcagaagctgccaatatttatttcgagtccaagaataccttagataataagattaatacgagaaatttagattttttcactgctgattttaatgaagatttcactgcatttcatggacaaactatgttagaccaagcagaatatttaaatgacgcaatatcctatatattatctttatatgaaggatcatattcctatgatatgcctttaccaaaatctgtaataattgtagcacattcaatgggcgggattgtgacaagattgatgatgactctggaaaatcacatcccaggctctattaacactatattaactttatctagtcctcatgccgtatctccagtgacatttgatggtgatatcttaaaaatatatcgaaaaatagatgattattgggtaaatcaatttaatgacgaaaattcattttttagtagaaatgtttcattaatctctattaccggcggtgtttctgatgatattttaccggctgattacgcatttgtggccgatttaatacctcctgagaatgggtttaccactttcactacaacaataccaaatgtttggacaccaattgaccatcttgccattgtctggtgtaaacaattaaggcatgttttagccaaattactgttagaaatagttgatagtacttgccattctaaaacaaaaccgcttgaggaaagaatcgaaatatcaaaacaatatcttctgtctggttttgaaaattatgctagagaaactaaaccgttatttaatccagaagtttcaagcaaaatacctgatgtaacttatgaatctggaataaatattgttgagggtaacacgcatttaaacatagacgaagagaattacgatagaattccagaatatactaaagtaattataccttcatgtaataatgcgcatgattggacattcactttattaacatcaatatccacttctcatgttaccttttgtaaaaaagcacctactataaactttcagaaaaatattagatgcgtatctgctgatgaaagcatcttgactatcccaaggtccactatacacaataactcaccagcagactcttcatgggatgaaaatgatactccttttaaaatgctatctatatcaggcaatgaattggaaaaatatgactttatcattgttcaaaaaccaccgagagaggaagtaataaattctaactttttactttttacacttttgaatgagccaaaaaatgaaattagatatactaaaccttttgatatattatttagaggtgaaaaactaacgttgcaatcagggcctggtattattactaaaacctgggatttccctcatctttggaattctctaatatcttatcaactaactatatcttctaaaaaaaatgatgataataacctatttgaaccattcttaaaacaaaccactttcgagccatttgagaccaagtggcatattaatataaggaaattggaaaaacttggaataacgatgcataatgtggccccatttattcctatcgatgaaactcagacaaggatgttatcatttactttaaccattccctcagaaactgatattgatatgcgtctagaaattaactgggggttaacgttaaaattattatttataaggtatagattggccatagcctcatatctaattacgtttatttcatttatcttattttatcaattttattactttaaaatgtcaaataaatttatcagttttcaagaagctataaacaccattattcaaaagtttggataccttcttctcttaggatcagtgattttaagccccattattaataacaaatggatcgagaagatattatatcttttagatccagtaaaattaaacaatccatttgcatccgaagagctccatatctataacaattattattacttaggtattagggattttttctctagctttattggattactatttactttaatgacaataggtgtattctttgtttttggaaagttcttcgacctcctcgaatatataatatccaaagttacaaagcataacttgaaaagagccgaagtcaatagtcatatcatgaatgagacaattttcgacaaaaaaagaattgtaggttgtattatattaacaactgcagtacttttctatattccttaccagttggcatttttgttgatggtttttgttcaatctgtaacatgcatcagagtaattattcattataaccgaaatgctggaaacgatcatctacattggaagaatattaaaaattataatgtttccattctgttatatacaatagtcatagcaattgtcgatactcctatcatcatagtgtttttccacaatgtcgcaattaaatgggaaaccacattaaactctcatcacaatgtcttagctatacttccatttatattctttgtagtagctaattcaaagtttcacatcccaaactacaagaaaccaactgactggtttattctactcgggctaatcgcttatactgcatttttctcaacaatatatggtattagaaatctattttggttacatcatattacaaatatactaagtggatggttattttacggatgtttgaaaatttagttaaaatatccactgaatttatatgttaacatttaaatttaatatgtataatatcaaaaaaaatagaatctattaaaaagaagggtcgcataaaatttcataatcaattaataaagaaatacaatttatgaaagtttaacatatattttaataacactacttagtccaataatatatttgagtcactattttcatcacttgccaaccaaaattttctggcctctacatcttcttgtgtgtttggcgtatacacagtaaatgatgtgtcaattttagtatcaaatacatcaattgtctgtttcttcacctctgatttctcatttttcaacttatcaaatgataagtctgatgatataccataataaatattatctgaatattctttttcagaattatgctcttctttatgaatctctacaaaacctgaagtattatcatattcccttgcattacttctagtgttttgcttatttcttgatatataccttttgattatatttgttggaaaggatccagaattaggactggaaacagtgcttgaggatgataaatcctcaattcccgtaggataaaatccagtaggggttaatggtgggtcagatttaaaactcctggtacttgatgccgtattaatagatcctgcccaaatagatgataagggcaacgataaaaccactaatagagttgacactgaaactaatacatcttcattagattgtaatgcatatgctaaaattgtcaaaatagaaggtacaacaagcgaatgacatgtcataattaacaagatatgaaaactgtcgaactgctttaatcctagaaattttcttgcacgtatagccaaaatcaatttaatgaccaagataagtgtcatgaaattaattgaaccagcaaataggatattggcaatgttgtaatatttatcacctttgttagttatccctgtataaatactccttattatcataacaacagccgttaaaagcataccgcttgtagttaagccaattgcaattgaagctgtcagaagaaagtaactaatttttttaaagctatcaccggaaaacataactttgacttggaacacaagggaacattctatacaaaccactaataacaacttaaaaatgtcagcagcagcagaaatatgtaggttgtatttatgaaccatttgcgggaattctgttaatgctaaagtgacagaagactgggatgacagaatatatttaaaataaaaagcagattgcaaaaacagcaaaaataatgacatctggttcaaaatgaatattggggttttctttcgcttagatactaaccacataattatgaatgtaattatggaagctccacagcagacaccaaatactatagattgtcgtattttagtgttaatgagatattgtaattcaccaaatgtaatgcttgaagggccataaactgttaagaaagttaaatttcctgttaaaggatcataatcaggatcgaacatcatactgactgatccaatagaaaaatctattcctgtatagttgtgatcttgagttgatataggtattgctatttttgtttttattatttactcttttccaagtgtcatgatttttatcataatatatggatttatttatggatatcaaagacataaaaagacttcttaatatatttcagcgtcacaactagtatcttatatccaataaacatgactattcaactgtaattcgagatatatgaagtcttgatgacaatagaacttctttttggatataagtttcatgtaaattacccgattaggataattacgtacttttcaacaacatatacctcaaattaattgacatagaagttgagtggtattaagagaagaagcaacaaactttttattttttatgggctacactatggaattacttgaaagattaaattaagatttaattatttttaaaactgtattatatttatgaaacattacatcgtaaaaataaccgttaaccttactgttagttaattagcctttgcaaacaaggcaataacattcaataaaaaagcatcgatctttaaattatcgccgtttcaaaactgttacaaaataaagcattgtgggtattaatcatgtaaaaaagcttttaatctatactaatactttagaaaaaaaccattgcagcaaatttgctattgaatcatacatcacatcttattttatttattaaggattaacgtaatataaatgaatatacccaatcgttataagatttgctagtatattacccttctttactattaaaccaacttgaagcaaatttcctcaattgagcttaattaatttatatacggttatgtgcaaagctactcatcaaaaaatattcaaataagaacattaaacaagtattatctttgttaaagggaccgcataaatcaagacagtttcaaattactatgttgctttttttttttctctatctttttttgtgagcatagtaattataagcattgagaaataggtgtttgcaaactaattgaaaattatacagcatgtaccctattacctacaagtaaatttatgtgtctcgtactacaatcttgatgaaataatacttggacagcagtaagtaatttttcttatcattaaatagttgattgatacagatttacataataacacaaaattgaaaaaaatagaaaatcgcaaagttaaaacaaaacaatgcaaaatcacacttacaccaacaagattataaacatctttcaatgacacacttcttttttataatcattgttggataatataatttaatgtcgagatctttagaattaaaaaggtaagcaaaaaagagtcaataaataaagaatttatttgctaatgatgtcaaacggtgtagcaaatcattttgaattgactaatgaatctgataagataaaaaaagcaaagaatcttaaatcaaaaataatatttgaaaaattaaattcaataggtataaacaataactcccaattagaaaacttatcattatcattacttggcatcactgaatttggatttattaataattcaataagaaaaaaatgttgggtctatttattaactcatcaaatggataggatgagaaaggaagacgatgaattgattaatgttgaaacaaataatttacctcataaagatgaagatcaagttaggttagatacagatagatcttttggatatattaaagattcaattctgaaaaatagattaaaacggatcctttatgatatcattataggtacattaaaaagaaatccacaactaaattactaccaaggttatcatgatgttgcatctatatttgttatgatatattatgaagatattgtcaaaaataaatataagaaacaaattaacgaaatgatattaatcttagagatatttacattaatgtatttaagagatttcatgatggattctttagatttcacaatagatcaactgaagattgtcactcagattttaatgaaaatgaataaaaaatttgttaataaactgaagttggataaacaagagccgttctatatgattagcagtgttttaacaatatattctcatcattttaaacccaagataaatcaaaaatatcaagatgaatctaatttaatatatgaaatatttgacatggttatatgtagtcagtcaatgatattaccattgataatatattcaaaatttctgttgaacaataaaaaccttttattaaaagaatatgaaactaatttagaacattttgacaacataaatgatttaatacatgcatcaatacaaaatgctattgtgagaagttttcaatacacagagaaaaaccgagatcatttaaaacagtggtataccatcttgaatgaaataagattcagtttcattaacaataaaattaaaataccatctttgaaaggacaaatcaacaaatacagcccactattgactacagcaacaaattataatttaaaacatttccaatttaaaacatatgatgaagttgacttgaaatcattaatgaacaaaggtataaaattaaataaaatccgtcaaaacatggatgaaagacagaccaaaaaattgtatagacagcagaactatccctttcttctcaagatattagatgatcagtacatgaatctatccccattaatcaaaatatctgtatgtattgccatcttagcactatgtataaagtattctgatcaaagcagcaatggtttcatccttaaaatatatcataacatgttgtttcagaatattctaccaaaaatgaaagtaagattaacttcttcactcaaatgaccagctatgtaatatgtaataatacttagtaataataaaccatctctccttcaagaaaactttcatatttgctgtatgttcaatatttatattcacaatgtaatccacacttactcaaaaattcagtggcgctatcatacgcttcatgctttgtaatttgttctccgccggtatttttgattgaccctcaaaacctttaagcccaactttaaaggttcagtgattcgactaatcccaaggatgcagtcctcaaatataagtagaaaaaaaatttgtttaccagtacatactataccagtgtatctgattatactagttttactgaccattcatctttatttgatttatttagcacgacaattgtagttgttcccattttgtgtagcagggtgccttatacaactgacaagtaagtatatctaaaaaaacaaaagatagcatcaaacatttcacttaattgctaatttatatatcatatacaaatagatagagaacacaacagaatggctgaatttgctgctgaagtagatgatttgacttatacattccattcatcggctgaaccatccttgtcacgcattaatttaaaaataccatggaacacaagaaccttagtagttggttctaacggtgcaggtaaatctactttattgaaattgttgagtgggaaacatctttgtctaaatggtaagatcagagtcaacggactagacccctttagtccaatttcaatgcaaattaattctgcaaaggagaatggtgatgaaaatgttcaaattaccacttatttaggtacggaatggtgccatatgagcatcatcaacagagacattggggttcttgaattattggaaagtattggattaaaccattacaaagctcgtggagagagactgatagaaattttagaagtagatctcaattggaggatgcataggttgtctgatggacaaaaaagacgtgtacaattagtgatgggtcttttaaaaccatggagagtcttgctattagatgaagtcactgtagatttagatgttattgccagatccagattattaatgtttttaaaagaagagaccgagactcgtaaatgttctgtaatttatgctactcatatctttgacggcttagctaaatggccggataaaattattcacattaaggaaggttttattgtagaggagatagattataaaaatgatgtggaatttgtcttacctgacaataatagtactaataataatggaaatggtgttattagatataatcaagattctaaaccaaagatttctgtgagtaaagtagacagtttacatccattagccctttcctggttgaaacgtgacaataatattacagatcgaatccaataagtattttgacatacaatatcatactttattatatatacatctatatacgtgtacattatacatacatacatatatatatatatatgtatatatatatatataacaaaattttcacaatatactaattttaacgtaaatgtcatttttgtttgaattttttttccctatggctagaagctaatattaaaatatcatctagaagggagaaggaaattatcaattgctacttatatttcttttttgaatctgcaacattaacaaactagattacgaacaaaaatggctctcgttacatcattccacaatgacgcaaagtctaataactctgaattaatatgtactacgaaattcgctagaatatataaatttgattcaaaatatgctattaaatgtattgatttagaaaattgtattccaccacatgaaccaagatttgagctatcaatattgaaaaagttgacttcacaggacagtagtcaccagaatgttattaaattaattgagttttgtgaaacaagatccactgatgaacttgagctattcttcccttggtatccattaacgttacaaaaatttatgaatgatcattggaaattaaagaataataataataatggtacgaaaagaagatttaatccatattataatttaggaatagacaaacagttttataatgatatcagcaatagtaatatcaacgaaggtaacgagtgtgataagttagaatacattaacactttagatgtaaacaaatattgtttagacttctttatccaattattggagggtttatcattcattcataaacagggtataatccatcgagatattaaaccagataatattttagtacaaataaaagaacccataaatttagttatcgcagactttggtatatcatatgacacaaaaaactccaaacaattaatgcaagaacccttggatcataaaatcacagatatctccacttcattctataaagcacctgaactattatttagttgtaagaactattctatggcagttgatgtatggtctttaatggttataattactcaatggttccaatctaaaggtaaatatccgacagttcctgcaatatttgataatggatcaaatgttcttgatgatggaaacggtagtgatattagattgattttgtcgatatttgaaaagttggggattccatcagtagaagaatggcaggaagtaaaaatgtatggatctattgacgcctttgttgggttatttggcgaaactggtaatggtcaatatctttttaatttatcgatagaggaacaacaatctaagatcttagaatatttaccacgaatgaatgaaatcctggatatacatttaaggttgacgatgattaattgtatattgcgaatgatgagtttgcagtctgatgaaagatggcactgttcagaacttttaagagagattaaaaagaatttgaaagacaacagtaccaaataacagtgaatatatataaggctgcatacacaatactatatgtctatatatattagtaaacaccaatcttttgctatcaataaaaaagaaacacatgcatactattgtcataatgttgaattataaatatatataaagttcattacaaaacatgtacaaagattctatgtgatgagaggaatggatctccattccccctttttttttttttaaagaataataatgcaatgtagttggatagatagtttatttaaaaagaaaatctactatatttgttgaaaatattatcatcgttattagattggccgaaaaatgagattgaaagagaaaaaccaacactataaagtcatcagccttgatgtagagtaatttacacagctaatgggtattgaccaacccagttgtaaatttcttcttttatttttggtaattcacctgggttagcatcaacagcagctttgaaatctttcaatttgttagcttcctttggtaaggccttttgaacatcttcagcgatcttaacagcagtatcaatgtattgaacaatcttagcgaagtcttcctcacccatacctctggtagtcatagctggggcaccgatacgaacaccacctgggactaaagcagatttgtcacctgggatagagttcttgtttaaggcaatgttgatcttatcacagatgtattcaacacgggcaccatcgacgcccttttctcttaaggagaccaagaccatatgagaatcggttccgtcagcgactaatctgtaacctaatttcttgaattcattttccaaagtcttagcgttcttaataacttgttcctggtattctctgaattctggggtagcggcttgtttcaaagcagtagccaaagcagcgatggtatggttatgtggaccaccttggtgacctgggaagacagaaaaattgattgggttttccaaatcatacatgatctctttcccagtctttggatcaacagatctaacaccacgtctgaagaagatcatggcaccacgtggacctctcaaggatttatgagtagtggtggtgacgatatcagcatactcgaatggggatgggatgacaccagcggcaactaaaccagaaatgtgggccatatcgaccatcaaataagcaccgcatttgtcagcaatttccctcattctcttgtaatcgatcaaacgacagtaggcggaagtacctgctacaagaacctttggtctgtataagatagcgttcttctccaaagtgtcgtagtcgataataccagtctctgggtcaactctgtatgggaaagactcaaaataggtggagacagcagagatatttctggttggagtagcataaccgtgagataaatgaccaccgtctggtaagtaaagacccatcaatctctcgtgtggcttcatgatagcttgatagacttgtaaattagctggagaaccagacaaggtctggacattaaccccccacttgtctggagtaacatggaatgcctttagagcacgttgttgacataaagtttcgatttgatcgatatattcgttaccaccgtagtaacgggcacctgggtaaccttcagagtacttgttacatagcggagtacctagggcgtcgaaaacactggtagtggtgaagttttcggaggcaattaagaccaaggaatgtttttgtctttcaatttcgtgatcaattaaagattgcagttctgggtcagattcttttaagtgttcagaaaccaatttcttgtgagcttcagataatgcgtaaaccattttataattagtgaaatgcgtatctataaaaacgttttataaagtgaagaaaataaaaataaggagcagtaagcgtagtattgtattttgttgttgttgtcgttattgttagatgctttgctctacttacatatattagaatatataaagtccacaattaaacatgtgcagaggaaaatatgatgggttaagagaaaaaaaaaatccaagaacaaagactcctttatatacatgaacaacgtctaacacgcccacggaacgttgttgaaagttcaattaacataatccttcgtttgagaataacaaaaataaatgggattaatgagtgggaaataaatgattgaaataattgaatcatcaaaaaacgaaaaaagaaattaacatcccactcgttccggtcatttttttttttagctttgcacaggattttgtcgtttctttttttctttttaattttctcgtcgtctgacacgtgcggggtgtgtgggtgcagtaacagagggaatcaaggtaacgccaaccagagtcaacagaggccagagttctgactttgactcggccaaccacgtctcaattgactcaggcgtgactcagtgagaagctggacaagcacagtagagaaaaatagacagagtaaactgtggagagaattgactcggtttgtctaacacctctttattccctctccctccagatccccagctatatttaattcttccccattctttctttcttttttttttttttttctttgtgtaataaaactagcaccatcatcttcaatatgattctgattcaacttcttggactacttctaagactttcaaaagattctcctttgtcgcatctctacccattaacccaattctaatgtacttggtcctaatggctggatggatcccacctgcaatatcaatatcaataccctgtaatctcttcatcacttctgatggatttgacacatatatagctgcaagcccgtgtgcagtcttttcaactggacccaatgtgactagtctcaatttcatctcttcgaccacttgcatctttaaccagttactacgtgacaaatggttagttacgtagtctgtctctaatagttccttcaatgcaacatccaacgataagattaattggatcggtggggtagcaaaataatggacctttccacctaattcatatgattgaatacttgggacccatttccttaatgatgtaaaatacggtcttggtggtgcatccacatcgttgcgttcctttagtacaagccttaacgcacgttcactgatgatagaaatagataaccctggtggtgcacccaaggccttttgtgaagcagagaatacaaagtctaacccccatttatcaaattcaatggactcacaacctagggaacacacagcatcaacgacaatcaaactctctggtgagtggctgtgcaccaaaccagataacttttcaacatcgtttagcacaccagtagatgtgtctacatgggtcattaacacaagatcatactttgtttcctgtaacatctcttgtaacacgactatatcgataccaccacccacttgtttactggacaatactgtgacatccaatttatagaactctctcaaacattcgcataattcttcactgaagtacccagtagataaaagcagtaatttttccttgcctgttggacataagttacttccaactaagtcgaatcccaaggttcccgaacctgcaaggactaatggtaatgatccgctttctttagaagaattaaatattttacgtaagttaagtagtactcttttgaatgtttcagcaaaccttggacctgtatgggttagagaatcttgtcctaatgtgtcgatcactaaatctgtacaactgactggtcctggaattaataacatctttttttctttctcctttttgctttgtcgtatctgtctttccttctgattatgaaaagttttctgaacccaagggaaagaaaacagtttgcgatacaagaattgaggatgtattttaagggagaggatatgggagaaaccagtttttgataagattatgagccatattacattctacacttgtagtatacatacatacatacatatatatatatgtgtgtgcgtgtgcgtgtgcgcgcaaagaatgtcatctatctgttagaaagtaccccttttacagggtcttgttatacattctacaatgttcccttctgccgtactcataagaccaatataacgttttttactcagcttgtattacgaaagaggaaccacttgcgtattatattatatggacgcaaaatttcatcgaatcaaattgtatttaatgttgtcacaatttcttcaaaacaagaaagaaccataacaacaaaaaaaaaagaataaaatataaaatttacggagttccaagaacgcaaggcactatcatgatttcatttgcaagtatttcaacacttaaaaagatgaaaagagataaggaaagaaggaacacattagcagtcaggtaataggctgtgtactaatccttactcaatagcaataataacggtaaaaatagacaaagattctttataaaaatatataaaaaaactatgcatatatatgtatatatagggaaaaaagaaaaaaaaagaaactaaaagaatgaacttttagaggtatccatcatatttgttatatgaacagttgaaagagtcgtctgttccactctatgaatatatgaaaaaaaattgaacaaaaggtaaacttatgataaaattctttcttttctatttagaaggaagcgccagcaatcactgtcatagtattaaaatggaaacataggaaccaatttcaaataaaaacattcttgaacaagttgtgtattctttttatttttttatttattttttacttttttgtcttcttgattgcataatttaggtaattgagaaactaagaaccactagaaaaaagttgaaagggagagagatgagatatagtagatctttcacatatctaacgatagactattgtataagttatcagaattgatattcatatcatcatttgaatgcgcttcgggcaacaaagagataaaatgaaattgggaacaatatcaatcaatgacacacacacacacacgaaaaaaaacatacaaaaaatatcatctaatcaccacttagccacagatagacaacaaccaaaaaaaaaaaaagatagatatatgtatataatttgtaatcataaagaaaactgctggattacgcattaaatcccaatcaattgatacacttaagaaatctaatgagttagaatttgtaatagaatcttgtactgaattcaatgcatcaaaaatttctgtttttatgggacaattgttctgcctaatatcagactcattaaataaaggtggatctatagtagctgttgtagatactaaaccgttattagcatctatggcttctgtgttatttgaatcattcgattttttaaaattatttaataaaaagaaatcttcaatatttttatattctgtttcttgtttaactaaattgtcttgatctatagaaatatttgaatttgatacagttgaacttgaaggggatatatatgaatagaattgacttattccattctcatgatcctctttcgataaataatcatcattaggagtaccagtagtagtaccagtgcctgcactactactattaccactactactactactatgattatcatcattatcattatcattattatcttctaatgaaagtagtttgtttaaaagaaatggatctttttccttcaattgatcttttatattcaataaatcgaaaatttcatcatatagtttcaacttagattctattgattccatgtaaagtctcttcctctctcttgattttctagcggctcttctgtttctcattatgcgctcgattcttctttgttccttttcctcctttgtcttagctctcttacgtggtgggagagtaaatttaaaatcgtctgggattattgtctttaaaactgtgactgtggtgatatttgatgacattttttatataggttagtatgtgcctatgtgtgtatgtgtgtgtacgaagttcttttagaaaaagagatttttttttgaaagggaaaggtgtatatatatatacgtataagtctctgcgtgttttatatattatattatccaaatccttttccaatccttgaacatgcgtgtatatatatatatatatttgtgtgtgtgtatgtgttaatgcactcgagaaaaagcaaaaaaaaaaaaaaaaaaaaaaagaaacgaaaacttttatctcagccacaaatttttgaacacgtcacagaaaccaagaaaaaaaaaaagaaataaaacgaagaaaaaacaaaaaggaagagattggataaacataaagacatatagggttagcaaaacttgtctttctcgtttaccacacagaggttagggtatgggatcaaaatacacttctgttgccatggtttccgtagttattttctccttgcgcacatgctacacacgttatgcacgttgactgtgattaaaacaataggcagcctgcaagagggccaaagaaatgagcggaaatttcgaactacaaacataaaaaaaaataagaaaataaaagatcgaaaccttcttcgcttatatcatgaagaaatgttggatttctatactatacattgatacatttagaacatatagagtttccttccatctattatttttcagatatcacagtaattagaaataaaatataagaattcaacagattcacaattgcagatagatatcaatacgagattatagcgatatacagattacactttgttccaatatgtcaggtaatattccacattcagcttcaaggttggtgataagtaaatatataaacaaacaaactatgaaatatatatttaccacacatttctgggggccagtgtctaactttggtataccaattgctgctttattggatttgaagaaggatccaaatttaatatctggtccaatgactttcgctcttgttatatacagtggggtgtttatgaggtatgctttggcagtgacgccaaagaattatttactgttcggttgtcatattattaattctgctgcacaattaggtcaaggttacagattcttaatgaataaatattatcaccaggataataaaaaataaataaataataaataaaaaaaaactatacacaaatcatgtataaagaaacagattttacgagtttttagagtatattactaatattatctaattcaaggcctgttatgctattttaactatttattcttttcatgcgcaatctatctaatattatatctatatgtatgtatgtacgagatctttaattctaatggagcttcatatccatttacacccattagtgtatgtttacttggaatacttatagatttcttaccactactatatggataatatgatataagaaaaataataatatgtgtctttgttttgtatagaaattttaaaaaaataaggaaaaagaaaaataaaacaaaaataataataataataataataataataataataataataataataataaaggaaactggtttttataaaaagtatatacatatacatatttatttacaactgcttgtaaatatacttggttataacatatattctcaacaaaacaacaagactatcggtttgctcaatattatcatattagttctattagatatatacgtcaaaattcttttttatacttagatattattattattattattccttttttttatctctgtttttattcgtatcttttccttttcttctataagatatacgatggacaatgtatctaccacaagtgataaaagtaattcaagtcccacttatgaagattatttgaaattagctactgatccacaatctactgtagtattggaactagatccaaatggcattattcaatacatttcaaaacaatggttggagattgtatcatttaaggggaatggcaatagtcatgagttgcctatttggaagccaatcaaagatttgatcaaaggtgacttaaatgacaagttggtgtttgaaagagccatggagttaatgctacaaaatgataatatcagctatactgtcactttcaccacgttggatgatttaatttttgaagcgtcagggattttaatcttaactgataccaaggttcccagtcatactatgtggataataaaaccttttgtagatattaatccattaggtacagcaaattctaatttgacaaatcaactttatcagattaatgatccgcaattttggaaaaaattgggttatggggccacttatttaaatgattacctaaatgaaattgtcaattcaaatatcgttaatgaaatagatttacctccaccaaggttggaactttgtcgtgtttgtgaatgttttgtcccggactggtggttggagttacattgtcagacttgtattgtggaacaccgaatagaatctattatccaattgttgcatgataatttagtcgatcaattgaatcttttaactaaattgattgacaataacaacgatagcagtaataacaataatatcaccaacactatcaccactacttctacgactattactactactaataataataacaaccagagtatactactagaacattttacttataaaggtttaccattagagtataaatctgcttctcatgtcatcaatataatatattctttaattcaattatgtcaatgggcaataaatattaatacaagtgaactgatcttaaaatatcataaatttaatagtaataagactaatggtggtattactaaaaatactacgaatcatgaccatttaatgtcatttttaaaacaaaatatagacaactacaataatagtgagatcccgcaagaaagtcgggaaaacacaggttggagttttgaattctcaccaaatacaaaatccaatattaaaagaatccaactatgggaaaatccattaaataacatagataatcaagaagtgttacaattagatatgaataccaatggcttatctttattaattaatgatacaatacaattagctaaggaaaaagttgatgctgttgtcagattagataatactatgacatattcatggaccatcaagaatgaaattaacaatgatattttgaaagtaattaataaccaattagagataaattcttatgaacttttaaatactaaaaaagaacttttttcaacagaattagatggccttaatagcactaggggtattgataatactgacgatgaaaaactgcctaaattagaatcgccacaaccatcaaagagaaaattttttgctgattcttatctacaaaatgatgatattccctcactatcaacacaaccagaagttaataaaaaaataaattcaaacaacaatcacctctctcatttgtctgtgccaaatagtgagagccctgttccagatataatagcccccaaaccaatatcacagaaatcatctagatcagtcaccccaagtacacagttagattttgaaaaaaacacagataatataattgtgcaccctactatacgacaggaggatggtagcattattgtacatgatatgagtattaaaaatgatagaagtgatgctgtaggttctattgtttctaactctgatctgaaaattgaaacatcaaactctaatatcttgaaaacaaccgatttaaataacgataatactacagcaaatattagcgtgcctttacagcgtataagaaatagaatatcagaaccagtaatttattcaagcaacaatatggaaaaatcagaaaataataacaatacattatatccaaaagtattttctacaatatcattaacaccaagaagaggatcacctttattaatacaaagaccaaacagtattaaagcaccccttttactctcagaaaagtcaccattgaattccccctttattactggtagagaatttcttactcctgaacaatatcctaatattttaaattcgccaaaccaaccattatcacctttactattagcaacaaatcattttaagagtcccacaccaagcataaaagattatgatattttgaaaccaattagtaaaggtgcttatggaagtgtttatctggctaggaaaaaattaactggtgaatattttgctatcaaagttttgaaaaaatcggacatgattgctaagaatcaagtaacaaacatcaaatcagaaagagctataatgatggtacaaagtgaaaaatcttatgttgctaaactatttgccactttccaaaataaggagaatttgtttttggtgatggaatatctacctggaggagatttagctgcattaattaagatgatgggttatttaccagataaatggtgtaaacaatacctgagtgaaattgtttgcagtgttgatgatatgcatcaagaaggaattattcaccatgatttgaaacctgataatttattgattgattcaaaagggcatattaaattaattgatttcggactttctagagcaggtttagttaaaagacataaggtgatttatgcaactgataaaccttcttctataatttcaagtaatccttctactccagaatctactagttccagtaacaattttccttatcgcgtaagaaaattatctaattctaagcagtacatggattctattgacagttcacgacaaacacctcgttcaacatcgataatagatccaatttatagcataggtaatgatattcacagtttaaagagaacagaatctcaactatctttttccatgatagatgtgtctagatcaagcacaccaccacctccaacattattaaattcacagactgcatctgtaagtactacctccgcaagaacagtcactggtggttcccatattgacagtagcatttcaactagtggtaatgtgcttataggaaacacttcttctgaaatggaaaatcaaactttagcacataatatcagtactccagaacgtccaagaattggttccattgattcacaagaactgcgtattaatacagttaattctacagcatcgaaaattaacattaatagtataaataatagtgtatctgcggctatgtcagatttggctttatttcatcctgggaaccctaaaaagaacaaacgatttttcggtactccagactatctggcaccggaaactattcaaggcactggtgaggatgaaaattgtgattggtggtctgttggttgtatattttttgaattgctgctgggatatcctccttttcatgcaagcactccagaaaaggtatttgaaaaaattcttacctgtgatatacaatggcccggatttagttcaatagaagaagaaaaagaggttatttctcctgaagcaaaagatctaatattaaagttgcttgttaccgacccaaagaaacgtttaggctccaaaggcgtagaagaaatcaaaaatcacccgtatttaaaagatgtagattggaagaatgtatatgaagaagaagcctcttttgttcctaatattgataatcctgaggatactgattattttgattcgcgtggtgtagcttttcaagattttgatgatgacagtccaaaacacaatgaagaaagtagatttgaagttgaaaatactagttctttaaaccagggtacaagcatttccaatagtaacttggacgttcctgaaattcaaaccagtatgatacccaatccatcattacagacagacatatcatctacaccatcatcagtaaaatggaaaagtttatcagcctctagccccagttataaagagagagaaggtatgagagatatggttaataaacctatgaataaattaagtatatcttctgtattagaatcactttctactgatataagtacaggcccacgaaattctactaaaagcctttctttggcaatcccagcacatatgagggaaagaagagttagtaaactgagtgaaagtcagacagaattcggatcgttttcttttagaaatttatcagcgttagataaagcaaataaggatgcaataaacagattaaagaacgaacatatgaatgagttttcaggacacagaagacgatcatcaggatctcaagctggctcatcatcagataattcgtttgggaaagcacgaacaggtagattatcgattaatggatcaccagcaattaattctattactagaaatattgttaaatcagataattcttcaataagatcctattcgccagataggtccataagtttggatcaatcaataacatcaagaaaaggcagtaatgcaagtgtgcttgaaaattctatgaatattaatccactgataacaaatgcaactaatcttcattcaaataattctttatattttagtgacacggaatcacctataactgcaaaatttaaatctccattgtcaccatcgtatgctgctcttcctcaaaaaactcgatcattgcaaatttcttcaacaaaacaaaggagaagttccagtgaaacaggaagtgaaacagatgatagattgaatgctgtatcaagagttaattttttaaggtatagaagaagaagtcagcgtagaagtggaaatgctaatcaggaaattgggtaccaattggatattctactgtgtgaaccgattcctatccatagatacagagctaccaaagatcttgaaagtttaggatgcactgtagtgagttgtggtgctggtgatgaattggtctctcgagcaactagtggagtcaagtttgatcttattataactactcttcgacttaaaaaacttggttcaatcgacattgtcaagcttttaagaagaacatacggaattaattccaacacaccggtgatcgctattacgaactattatcaagaagcatacaattcgcaagcatttgatgaggtggtagagaaaccggttgatattgaagatttacgcagaattattgcaaaatatgcattaaagaagagccaagaagaagaggatacaattttcagtgataatgatgacttccatctaacgtaatgttaattattgtggttaatcgttaagcagtgggtttttgagtatataagcaaggttaattctaatgatggatgcatcacataacaaaatacccatccttttcattcactcgctcactgtttttaagtaagtttatttatttgaagatgaggattctataaaggaaagttacccgcatctttgtcaaaatttttcttcttttattttttttttttgcttttggtttaaaatttgaaaaataaaaaatttcgagtgaataatatggaatgttgatgattcatttacgaattttatgatcaataaacaagcattggttttcgattgaactaattaaatgcaaacgttaaaagttgcttatattgtatcttgctctataacacttctttcatcccacagtttttccttctttcctttttttcttagcttttttcttgagattgtgagataaaattactattgaaacaaaccaagtgttttctgaaaccaattccgagtaaaaatgcctagcgttacagttaacaagcaacaactttttgagcttttaggtaagaattatactaatgaggaatttgatgaattatgtttccaatttggtgtagaattagatgaagataccactgaagaagctttgaagcttggtgaagaacctgaattaaaaattgatattggtgccaatagatatgatttattgtgtattgaaggtattgctcaatctttgaatgaatatttgggaagagcagagactccaaaatataagcttttaccacctaccaccaagttgtttattgataagtcttctgaacaagttagaccatatgcagcagcagccattttaagaggtattacttttaatgaaaaaaattatgcgtctttcattgctctacaagataaacttcattccaatatttgtagaaacagaagtttggtggctattggtacccatgacttagatactgtgcaaggcccattccgttatgctggtgtcccaccaaaggatattaaatttgttccattgaatcaaactgaagaatttacaggtgacaagttgattgaattttataaaagcccacaacaaaaaaacaatattggtcgttttgttcatttgattgaggattctccagtttacccattgttcactgataagaatggtgtggtttgttctttaccaccattaattaactcagaacattcaaaaataactctaaacacgcgtaatgtcttaatcgattgtactgccactgataagaccaaactagatattgttttgaaccaaattgttgctatgttttctcgctactgtgatgaaccatttactgttgaagctgttgaagttgtttccgaacataacggtcaatctcgtattactccagatatcagcattagaaacatggacacctctatttcatatattaacactgctctcggtttggaattaagtccagaagaaatttcaaaatgtttaaagaaattatctttacatgctaaaccttccactgaaaatccagacattttacatgtggaaattccaattactagaccagatgtcttacatccatgtgatatcatggaagatgttgctattggttatggttatgataacttaccaaagggtgaaaaattgtctaatgccaatttcattgcttctgctttaccaattaacaagatttcagatatttttagaatagtatcttctcaagcatcttggttagaagtcttaccattaactttgtgttctcatgatgaaaactttaagtttttaagagttgaagatgatggtacaaaggctgttaaactggctaatccaaaaactttagaatatcaagttgttagaacttctttgttaccaggtatcttaaaaactgttaaagaaaatagaaagcacacattaccaattaaggtttttgaaactggggatgttgtcttcaaaaatttggctctggaaagaaaggctaacaatgaacgtcactgggctgctatatatgtaggtaagaattctggtttcgaaattattcaaggtttgctaggtaagatgatgcaaacttttagaactaattgggttgcagattatggtgctgcatcaaattccagaggttattggattgaacaagatgattcattaacaacatatttcccaggtagaggtgctaagattatgtttagagctaaagagggtgctgagccacaagaaatcggtcatttaggtattttacatccagaagttatggttaactttgatatcccatatgctgcttcttatgttgaattaaatgcagaagtctttttatagattgaaatatatatatgtatatgtatgtattttattttgtctctaatgaatattatatatgaaataaatattgtgtatagataagaaataataaaatcaagaattcatttaaataatgcatgctgcaaatttatactatttgaaagagtgatagagtgtggaattgatgtgtacatatatatgtatacccacggtttggatagacaaatggttctatatatcatcaggaaacgtagcatgtactttatgttttacatttttcttcatttcgttatcttctggtaaaatagttttaccagcacctaacagctggaagttgttattagcatgatttgtttctgaagtagcagttaagttggaaatattctggttttttacagaatgcatatcatttgagttatcatgtttgctagaatcatttagatatttgggtacactgcccccttcattattcacttgattctttaatgcatcctcatgtatcgcctttttaagcttttctagctctctaaacaatgcactgtggtctacaattgcggcatctttaggtttcttcttgatcttttggtcacctattgaaatttctgaagaaatgtcttctaaattttgattttcaatagcattttcagccatttttttccacttagatttttttggtctcatccatttaggaacccaactattggtatgttcagacttttgagctaactttttctgagcagcatcgacttcacgaataagttttctctgcctttttgcttgttctggatccattgtttcttcaatttctacaaattcttcattaattacttcaataccaagcttctttaataatttaggcatatttttacgataggacatatgcccatctactaattcggtacagttgaaatcctcaataccttcaatatcattatcagctgatatacccatgactttgctaaaacctccagcagtagcacgaaataaatatccaagaacccaatctttctctgaataaccattaacaaatctaccacttactacagaacgtgccattactaattgttcctttttccgaactactggtgtaccaaagataaacacattttctaccaaacctaatgctctctttttacataattcaattagacatgaatatattactctggatcccaatgagaacccaattagtgttacgggtctttgtcctaaattccttgttattaatgtatcagctaatatcagacctgcagaccaagctctatctaaggatacattccaaggattatcgatgatataacctaatttggacaaagccattggccattgaatagccgacatgaatgcagtcaagatagtagcccctagtacttgttgtatagtttgggtaaaaacttcgctagctacaatattaatagtttgacctgtagactttaacatttcgggttcccaatacaaggaatacaaatcaccttctacaggatctacagtggagaatggtaacctgacatcatcctcattacctataatccaaccagatacactgataagtaaattgactctacggttattgtgaagcggaataaattggaatgtgcgaacactacccattcttttagacatacctctagctccaatgttagcaccaattgcagtacttgatacagccacgacagtcgtaccaccaacaccagtaagaaaaccagttgccccagtgatgcctattgttgaaagaccagcagcaataccagcaccgatcacaggtgctaataatcccccacttaacccaaggacaagcgatcctcctaccatagctaaaccaacatatgccatttttttacgttttttttgagcacgacgctttttcatatgttcagattcattccatatctgattatctgtagattgttccatatctaaggaatcagttacacgcttttcaaattcacacacttccaaatctgtgatacctaaggcttcagcaaatttaataagtaatgttctagatcttgcatcatatgtggagttttgtaataaaactaggaatagatcacatatgatagtccaagcaatatctacagataaagttgttttgtttgtaatcatttcgggatcaattactttcttggctaaatttttatcatccttttctgatgttgacggtgagggagaagtggaaggaattgatgacgatgagtgttgagaatattgtgatatgctggacgtggaggatttttgtgaatgaggtgaattttcccaaggattacctatgtctcttgaggtctttaaacacttcaagatatcacttaactctattttatgtaatgataggttctcaatcattttgatttcttcttcattaatgtttagatgtgtgtatagtcgttgtaaaactaccaatttccacgaagccatatctttttgtgaaaagtttaaccgtgacgctaattttttatttgctacaatatccacacacaggcaaagcgtagcaaggtcttcacacatcttattagttagaatgttgatagcacctgcataagcaatcttttccatgtcagttaaaagtaagttggtaatatttaattgtgaacttaagttcaactcatcagtcttttctgcatcatcttcatattcatcataatattcttctgtatcgtgcggtaatgataaagttgaagcagaatttataagagattgttgtgaaagattaaaattaatactatcctcagtattattataattattttgcaaattttttagaatctttttatgttgaaataagaaatcagtttttttattggtggtatatgatctttgtgcttgttgttctgcagtaactttagtatattcaaaagtatttttgtgttccagattattctgtggacctgcattattttccgatgaggtttgatttttatatctcatatcattttccgaatactttttcaattccaactcccctttactattgtagatgttatatgaagctacagcaggtactgtatcccaattatctgaatctgaatctgaaactgaatctgaagctgaatctgagtttgtcaccgaattattttctaagttctgtttgtttatattatttttattaagcaaagatgtattgtttatatcatcagggaattgaaagcacaaatcttcagttatgttaggtttatctggtgtataaatcatatggtatagttctgagtctttttcttgaaaacttacatttgttattttattgttattttgattcttgttatcatcttgtgttatatatgtgttgttgtaaaattgttcatttaattcttcatatccattatctagagtccctaaatctacttctatgttattatttagtatttgtttataatatccactatggcttgagatgcatttagttagatgatggtcagtttcagcataactattttgtttctcaattttagcaagacttttattatcatgagctattccatcatccaaaacatcatcaggaaattgtatagtaatatcattgtcagtctgcaattccattggattttctttagataaatgttttgtgattttaagactttttaatgggatatccaaaggattcaggtcattatcttcatcattatcataatatttgttaatctttggaatatttggagtcttaaactcatgcatttcaaaagggaaatatagtagtatctatatatatatatatatatatatgcgtatgtgtgtgtgtaatgggtatgcttgtagatggtaaaatactcgttcacctccagtattaatgttgaaataattgtgcgttgaacttttgattagtagtgttgttctttataatatttgttacgtttggacagaaatgtatcttctttactttgttatattatgagatctatgtgcctttctacataattgaagtttgtatcaaatgtgaaaatagacttttttgatagcgccggatagatgtttctaatgttcaatattgtggataagattggtaaaatccagtaacgataggtgtggtgagattattcgaagaagataatatataattcagtttcaaccaaatttaaacctaagaaccagaatatcaaaagatgtttcccggtcaatggctataatttctttttttaatgattagataggaaattatagtgataatagatagatatataaatgtaatccaatgagaattagaaaaacgtaaacagttacaaaagtagaataaattcttcttaaataaatttctatgttacaacaatttcatatagtcacagacaatattgaatatttgatttgttgcatgaaaattatattacaaatttgtataacttattgttacttaattgattatctttgtttttattcttttttttttttttaagatttctgtgtgaatctccctatcaaagaaaaaaacagctttagcaactacaaaattatcagaaaccttgttcctgtcagtaaaatctataggtacatgctctgtttactaaaatacaaaaaaatagctcaataatttataaatagaagtgagtatggccagaatgttctcgttggcgtcatacataccctttaaaaaaatcttagtcaataatacttgtcaattattattattattattagtagtagtagtagtaaacgttcaatatccacctgtgttaaatattatgggactctaaaaaaaatctgtaatgttgtctatttttatcatatatctttgctacctatcaaataaaaatgtacaacttatcactgatatacgtttaaaataaatgaaaaaacgtagcagcatgaaaatgagttgtctcattgaatggagtgaacaaactagaaaaacataatatacattggattggaatacagtccgatgtatgttatgtccactttattttcttatttcaatcttatttttcttgtgtcaatataggttagatttttttgatttacagtattccatattatttaatctaatagaatccagaattgccttgatatattgttctatagttaattatcttaaattaccatttgagtcatcagtcataaaattgttagtaattgcttgcttaaccttttttgtaaatgattcttcaataatatttctatcaattttcttcctgtttaatgttatctttcaaaatattcttctgtttatttagcagcaagtcttgtatggagtttgttttatcattttcttgaaagttaggtatgttgtttaattatagaagttgttcatcactatcatctttactattattattatagttcatttctgttccatgaatgttcatattaagttcattattttatgtaataagacgattcattaccatgttatctcattacatagagtaagtataaactaccaattttgcagatcttgctgactgaaagtttttcaggtacaaaagaattcaaaaaacgaaaataagagagatagaaacagagagagttggagttggagttggagctaaagttaaatttaaagccagtaagaaggcaatcaatgttttttttttgttaggttggtgattcttccacacgaacttacaactctatgccacttcccattgcagactttgcgcagaagtcttctgtaaacccagaaacactccattcttctagcgcccgcgtgtgccagtttttgtgacttttgtggccaccatccagacaccatcaaaagaaacttgcggaaacttgcggaaacttgcggaaacctgcggataaacaggaactgatgaaaaataatcaaactccatttgattctgtgggtatctgtggagcattactataaggatttacatatatcatcccattttttcctttacgttgcatgtacaagctagtttcccattcttctctgaagagtagctcatatacgtgtacatataaaaaagcaacggtttatctatttgatactacttatttggcatagttattcctgcttttactggatccagaagatttttttttttactattggattaaggtaaaatattttgaaggtgtaatttctctattttagttttaatttttgaataatatatacgagttttatagagattaatcgcagttttattatccttagaagaaacagcccaataaatacaaaagatcaaataaatatgtcttttttcaactttaaaggttttggtagaaacgcaaagaagaataaaaatcaagctactactacaactcataatacacaaactccaccactatcttctcctgttataccttctacaaaagcaaacaatttatattctaatgcacatcaaagtaactcaaaactgtctcttagaaaaaacatttcaccaaaaaagcaattcctgcagcagcagcaacagcaacatccacagctacaaccacaacaaatatataatataaataataatggaagtaatgttaagctagatggatctcctacaaggcaaataaattcgataccgtctgatcagcctaataaaccacaaaatattaaatcttttcaacaatcttcttctactaatagcagtcaacaatctaattctcagcaagtgatgtttttaagtgagccttttgttagaactgctttagtgaaaggttcttttaagactatcgtacaattaccgaaatatgtggatattggagagtggatcgcacttaacgttttcgagtttttcacaaacttaaatcatttctacggtgtaatcgcagaatacgtaacaccagaagcatacccaacaatgaatgcaggccctcacacagattatctttggttagatgcaaataatagacaagtttcattacccgcaggtcaatatattgatttggctctaacttggatcaataataaagtgactgataaaaatttgtttccaacccaaaataatgtgtctttcccacaagcatttttaagagatgtacaaagagtcatgatacaaatgtttaggatttttgcacatatctatcatcatcactttgataagattgttcatttatctttggaagctcattggaattccttctttgcccactttatcagtttttcaaaagagttcaatattatcgatagaaaagaaatgattccattattaccactaatcgaaaatttcgaacaacaagggaaaataatataaatggattagttataatatataatataaatatagaaatatatacatacatctgcaagcctgtaacaataaactaattcctttataaatgtttatattatattttctatacaagtgaaacctttcagatcaactgataaggatacaggtactaaaatagttcttgttttttaagaactattcaaaaaatttccttatttattttcttttttttttgcccatagtgccaatgcttattaaatttttattatttacaggaatagtgaaatgctcatattattaaaaaaaggttattgataaaaaaaaatcattttcataagaaaatcatgaaatttatcattgccatcttaccttgacaacattttacatctcttccaacgtccaaattgtatttttcataatattaaaaaaagcaaacaatacaataatagccataatgatgagaaacaagttcaatttatgaaaagaagtaagtgctatttttgacatcgcgaacatcaaaattatccttaggtgggatagatggaagccttaatggaacaaaaatatttataccactaccactttttgcagacaaacagtctaatttttccagttcttcttcattgcccattgttactgagacagtagttctcatagatttgccttcttccactttaactggattattggaacttaataatttttgtcttgttctttcttcatatatttcatcagccaatgttgctggtcttcctaattttttactaagttctcctcttatcttcaatatatctttcacaattggtgtgttcctcggaacttttaccaattgaacgtaattcttgtatctttcatcaaattcttcctttaatctttcaatcaaatctatttcatgtaattttacaaactgatcccttagattcttattcattacttgaacatcacacgcgtgtgtccaatatgaatcatgaactgaggcaaaatcaagaccatcttctgcgcacttacttgcagataatagcatatgtgaggcgtctaaggaatgaataaaattaggtgggaaaccagccttttgtcttctagcattaatttgattcacagcaaaggggtcactaatatagaccgtttgaagattggtttggacttgtctcttctgaatctcacgatatggttgaacaattggaaggcccaatggagtcgtccaaataacagaggtcataaactcaggtttattcccattttgaaaagtattatgatcaatatctaatctaactgacttagatattcttttgcaacattcacctaaccaatcttgaattagatgtgctccatggaaagattctttaatagcagcaaagacgtgttttgctaaatattgcgaataatgtaatgattccttcttatcttcaaagtacgaaccaatttgtttgtctatttgaaatgtggcaccaaccattgtaacaccatacacatgagtcataacagtttgtttaacaatctttctatttaacttatcaacaaagaacttggcaattggatcatctttggtctctaaaattttctccaatctttttctaaccatattggcaacatgcaaataaacatcgtttggttttggtcctggaagtaagttgacttgttgtgcaccttcaatatcaccacctagagctgcataatgttgcaagccattgcatgtaccatcttgatgtacaggttgatgtgaataatattcttctggtttttctaactttaaggcctcattaatttcaaagcaggttgcaagtgcttgccatggtttatcagccgttttccaccaaccctcaccatttaacggattctctgcagaatcttttatcttatccaaatgtgcatcagtgaacgctaccctgtcttttaatggaactttatcaacaccgaaaagatttgacaaatgaatttttaaccacttcaaaccatctttacctaatttctttcctttccaaaatacaagaagaccacgactcatatcattacctaaatgattaaaatgcggtgataatggatacgcacgtcctctgaaatcaagattatgggggaagtagaatttttcacccaaaaatgctctagcaatttctaatttgtaattagaatcacatctcatagatctatttgcagaatactcattaacaagtgcccttgttttttgtttccacgcgttaatttcacctggatctgcagaacttggaggtcttggaggtaagtttaaatgatcttgaatttttggaatatccaaaaattcttctcccctgttccaaacttcagatacaacatcaaatacctttctgttaacagtccatgcggtatcacctagaacatttagcccatcgtaaactttatcaatggcatgtgaattcgatgcagcttctaaataggcaagttgctctgggcaatccttagttcttattaacattgactgactataaaaatagccccctgatttccaatttctccaagcacgaggtttcactaacatcggtaacaactgtggttgtactgacgcagctaatctttcaccattaagttgattaattaatgatttgtgaattttgataattcctaatttggcaccattatggtattgatagctatgtgaaaatgcaggagctttaccaacaacagtctcttttgttactggatctgtaccttctacccttactcttgccactctaatcaatttcgatattagaattgagccaatcttagctctcactgcttgtggccacacaactttagatttttcaattttcattgatctaaatgcatttttcgcattacgtatatattttctgaattctaccgattttttattaacttctttgaaaatacgggactcggtctttaatagttgttcagatctgaattccatttcaacagctttaccaacactaataacagcacgagcggttctcataccttccatgatcccacctgtggaattcagtttcaaaagttccaaaatagtaataacacacattttttctgggttcaccagcttcaaatagggagcaaaatctgtgtttttatttccaagcttatctttatgtttaataatctcctcctttaccaatggcaacatatcagtataccattcccacaactttgcatttaaggatttttggatagagatatcacctctagctttggcttcctcaaaatcatgtttccatctttcctttgcagcatcagtagcacgtaattctaaagctctttgtctatcctgattaaattcatttagcatattttcaaaatcatctttctctttttctgttttcaaattattatatatctgataaaaatcgatagtttcattatgatcggtctgtaaatcctttggtatgaattttgataattgttgtctttgggtatctgtaagtgttaaacctagcaaagtatgtttgactactttcataccgattgtgtctacatccttcaactcagttacatttttatttacagattgaatctcttcatcaaagagagtcttaattgatgtatcattagaatttgatggtaaaacagtgttcttgctgtaggcgttcagagtattgtttccatttccaacagacttattagatactacttcatctgggtgtaaattcaatgcaactgctcgtatagaatatggaatgtccttttcagagatcaatttcaaatcaaaatataattttttatagtcactaatagtcagtatatctaagtatgagcaaacgtttttataattattatcactcattttaaaatatgttgagatatgtgattttaaagcatctgaatttggaactaatctgattgcatgatgaatcaaaatggccaaagatttattgttgtaactaatcaaaggaaaatgtaaagtcaaatcatcttctaacaatttttcaagttgtctaatattagacatactttgtcctcttgcatccagatataaattataatcatcgacaaaattttgttttctgtgagatttaatctcgtatagtgattgtaagatagagaaggatctaggaaaattattcgtttgtaaacatgcttccaatagagaccataattgcattatatctctttgttcagtcattttggcagttgccaaagaatgtgtgttggtaaaagggttattacgtaatgtaaagcccggaggagacgtggaattagttgcaggggccgtagtgctattgttagtggttgaagaagcagttaaagttgtatcctgttgtggattgctaaagaaaaggggtaactggttagacacagtgacattagatgataatggagcattagtagtggaagatgggtcaatagaaacatgcgattcaaacgttgaaagttgtcttaagatttccacagaatgaaattgtcttcttagctgtgaacaagacagcacaacatagcgacaccttagcattgtatgttttttttttaaaagaaaaaaaaaagagagagagaggaagaagtagaagaaaaaggttggttttatgtgatatgatctgtattttaagaataaagtgttgaaaggttatgctatgattaagtatatgttcatagccatgtgtactgaaaagtccttggataaatatgccaaaatttcgtatgatataccctcttcttattcttttatgttttttttttttaaaaaaaaagaaaaacaaggaaattatagccatgtacacattttccagtacttcaaagtttttgtttttcaaaaatggaccagtgtatcacaaaaattatgtcgatcaaaatcttgaaaatgcggaatattcgaaagttggcgggttttgtttaatagagtgataaactgattttgcatttgcagttagacagagatagatagtatttataaactaaaagcattgagttccatagataaatgtatataaaagtaagcttcaatatttaagtctctacgtttcaactttttccttttttccagagagattcaatggagcagaaaaactcagattcatttcaaatgttatctgttaatgtatatcactaaaaaaataaaaaaataaaaaaataaaaaaataaaaaaataaacacatttttataacaataagatatatgtatattcaattcactggtttgcactggatgaaaagatatacgaaatcaagtattataatagaattagaaaaaaaataaaagtacataaaaaaaatgtttttaatgattttatatagtatatatatatatataagcatgtaatagccaaaagatggaaggaagggtgtgagaaatataaaacataggtatgtaattaaattaaaaaaaaaaaaaaaaaaaaaataaatagataaagataaataaaaaagatgcagggatattgataaatttactacaatttgtaaggatctttttaatttattgttattttattcttttattttattacatgatctaatatttttgtaataatctgagaaaaggataaatgaaagacggaggggtatattaattaaagctaatgaactatgtgttttattattagtattattagtattattattagtgacaactttttaaatttaggaatagacagtattcagagtatattacttttaatttcacatttgtttgttaatttgttcttgttttgtttaattaaaagtctcttgcattggttgttcatcatgatttaaagcatcatttgtggtagcgtagtgatcattcatctcgtcattattacccgaaatcaagccatcgttatcgatatcatcgtcgatgtcgtcgtcatctacagtagcctcttgatattgttgatattcattgaccaagtcgttcatattagattcagcttcagtgaactccatctcttccataccttcgcttgtgtaccagtgcaagaaagcttttcttttgaacatggcagtgaattggtcgccgacacgtctgaacaattgttggatagcggtggaattaccgatgaaagtggcggccatgtcaagatcctttggggccacggaacacacggcggtctggacgttgtttggaatccattccacgaaataatcgctgtttcttgtttggaccttgtgcatttcgtcttctacttccttgacggagacattgcctctgaagaaggcggcgacagtcaagtatcttccctttcttggatcagacgcggccatcatgtttcttgcatcgaacatttgttgggttaattctgggacggtcaaggatctgaaggattgtgaaccgatggcggtcaagggagcataaccgaccatgaagaaatgcaaacgtgggaaggggaccaagttgacagcgagttttctcaagtctgagttcaattgccctgggtaacgtagcgaggtggtgacaccggacatgacacgggagaccaggttattcagatcgacataggaaggctgatttaatcttagagttctttgacagatatcgtatagggcctcgttgtcgatacagaaggtttcatcagaatgttccaccaattggtggacggacaaagttgcgttataaggttccaccacggtatctgaggtttttggggatggtaagacggagaaagtggccatcattctgtctgggaactcttctctaatcttggagatcaaaagggtacccataccagacccagtaccaccacctagggaatgagtgatttggaaaccttgtagagaatcacagccttctacttctcttctgatgacgtccatgacggattcgacaagctctgcaccttcagtgtagtgaccttttgcccagacattaccagcagaggattggccgaagatgtagttatctggtctgaagaggttaccgatattagagtttttgacggcgtctatggttcctggttctaaatccacgttgatggatcttgggacatatttgccagaggaggcttcgttaaaatagacacccagtttatctctttgtaagtctgtggcagtggatttcaaattgccgttgaagtctagaccatgttcaccacagatggtttcccagaaggcagcaccgatttgattaccacattgaccagtagatatatgaataatttctctcatgttttgatattatgataatggtatgtattaaaattaaaaagaaggagaggaagaaaagaaagaaagaaagaaaagaaaaataataaagcagattagactagatttagtttagtgtagatactggacaggtaactgtgtaagtagatagatatatttgtgtttggatatatatgtgtatatgtatatgtgttttgtatgtgggttaatggtttttttttatttgatttttttttttattcctccatttgttttgtttacaccaagatctctcccgacgtatttattttttattttgtatttttgtttttttattgctttccctgagattttctcgcaggcagtcaaacaaacactaaaaaaagagagaaagagaaaaaaaaaaaaaaacaaacaaccaaaaaaagaaaaaaagaaaaaaagaaaaaaaaaaagacacgttccccccccccaacgacccccaaaaggcgaagaaaacccggcaaaaaagaatggcggattctattcttttctattatcttttttggtggtttttttttgcggaaatgatatatataatacaaaagataatacggattgcaagtatatattgattagaaagtacgtagagagagttatgtggatggttaactgtgtagcaaacagtaaacagcaatgtcaccacaacaccgtcttgttatcttgtggtcatctcatctttttttttgtctgtgtttgacgatgatacaacttgacaacgttctctacagtggagtggatcagaataagaacgttggtagtttttgtgccactgttttccatgataaccattgatgacactacacacaactacatatttatagataaataaaacagcacaacatagcgctgcgccgtagcatttgtatgttttttcttttttttttttttttgtttttattcgccctttctgcctctgcctccgcctcccctttttttcttttgttttgttcaaccctaacgtcttgctttggttaccctctttttttttcatttttagtttgtttgctttttttttttttttttttttttcgttttttcgttttttcgtttgtttattataattccgattttgcaaagattttgtgtttggggaaaagcaatcagtttaattagttatttttacaataatagagattattatttatcctttaaacactattttacatatacatatatacatatatgcacacacgtatacacgtacacatatatatatatatacatctatatataaaagataaaggataaaagataataacatgaatagtgaatacgactatcttttcaaattgctattaatcggtaactcaggtgttggtaaatcctgtctactactaagattctcagatgacacttacacaaatgactacatctccacaattggggtcgatttcaagattaaaaccatagaattggacggcaagactgtcaaactacaaatctgggatactgcaggacaagaaagattccgtactatcacttcctcctattacagaggctctcacggcattattatcgtctacgatgtcacagatcaagactccttcgatagtgttaaaatgtggttacaagaaattgaccgttatgccacctctactgtcctaaaactattggttggtaataaatgcgatttgaacgataagcgtgtggtggagtacgacactgctaaggaattcgctgaagctaatcaaatgcccttcttggagacaagtgccttggattcaactaatgtggaagaagcgtttttgaccatggcaagacaaatcaaagaatctatggcacaacaaaaattgaccaataaccaaggtaatagtcaaggtaatactggttccataaatgctggctcctctaataatgttaatttatcaagtggccaaagtttaacaaatcaatccaacggttgttgttaaagaaaggaaatgatataaaataaaaaatatgatgttatctttacatatctttctaacttttcttctttttttttttattattattattatttacgtacatatataataaaaataaactgacatacacacacacaaatataaacacaaacacacatctatatatctatatatctatacatttatatatatatatgtatttattaataaatgatttttcttttaacatttttgtatatcacactatatatatgtatatatgtatgtgtgtgtgtgtgtgtgtgtgttacgatctgtgtaatagtgagtgagaaaggaattaagatatattaaattataaaacgaagtaatataagataagaaaaaaaaaaattcttgtttttttttcaggttatgtatgtagtatatacgcctatttttatcaaaattctcttttttctaataatttggtatctttaaagaaatcattaaaatagggtgtttttacagtttgattataccagtttacaatatttggatagtccttcctccattcagaatcaaaataaaatttaaaaccaaaataaaaacaactggctgtaactaaatctgccaaagtaacatgatcccctactaaaaaccctttattcatatgtaactgcgtctcatatatatctaatatcttgcttaaccttgctaccgcaatgtcttgcttcttttcgtcaggtggccttaaaccaatgtttggtgcaatcacatcaatctcacaatttaaaaaatcactaaccgccatagattcccatctcaatatttcactctcggatttaatacaccaccctaataaagtgtcgctcttgaaatttgaatctggttgttcacttgccgttttgattaaaaaattgttaattgcaatagcttcagttaatctccaaccacttgtttcatcatatagcgttggtgtcaatttcaatgggaatattttgctgaaattgccttcctcttttgagatatctttgcattcaatatccagtttgaaatatcgggaaagtgaaagaggaacaatcggtctaatcatattgggggcgtaatataatattaaacccatcttgtccagtttcgaagttttaatacttctaaactgctacagaaaatggatgttagcacaaaaataccttctatattttaatattttgttgttttataataagttaatcaacaaaaacataaaaaaaattaataaggatagaaaataagaaaacttaatacgcacacacatacatacatacatatatatatatgtatgtatgtacgaataggttaccttaatttattaagattattttaaacctcatgccaatattcataaatttcctatatttttcttgggatactcaaaattaatatatgtgtatcgttccacctataaaagaaactcattgtcttattgaaccttaactagaaaaaacatccttattacatacattattataatatatatatatattgtattgttacttagagaatgaacttccaaaatatatatgctccctcttttattctccattcagttattaacctggattcactaagggataaaaagagacaatgagaaataggagagagtgataagggaaaaagacaccttaagcttgtttctaaacatataatcattgcaaagagattaaacaataaactacatattgtatatatatgtgtgtttatacttccatcactttttattttatacaaccaacactccttctctaaaaccattctatcaagtttctaaaggaatgaataactataatttaattgaagtgcaaatatcatacacacaggctccttaaaaatccataaagttggattagtgtctccctctttacacataattagaaatacacatagacacctgtgtcactttataaatcatcccaacacattatctatgttaacatattatgacagttacatccgtttaatactattttgtgtagtgtatgtaagcaaaataaaatatacgaaaaaaaaaaatttacatagaggcgaaacaggaaaatgttcaaataattacaaatatttgtaaaatgtagaaataaagacagagcatttatatgtatatgtatatttatatgtgtattgtcattatataactttcagaacccttctgtattgattctcatagttaactacactagaactgcatacaggtacatatattattagtcggtttttgtcactacagatgttctctttatctcaaaggtttcaaacgattattaacacagccatcacagcaggtatccttattgtggcattcattgtctccacatcttggattcaattatatttctacaatgcattccataactctgtctctatatccaacattaaaccaaagatatatctaagaacaagcagatattatgggtcgactaatgggaaaccaaaggagaatgttaaaattgatttcgatttacaaaccgacttgtctagtcttttcaattggaacacgaaacaaatattcgtttatttaactgctgaatatgaaaattctaagaatacaacttccaatgaattggccttttgggacaagattattaccagtccaaatgattctgtattggatttgaagaatgttaagtctaaatataatgtttgggatgttaatgaaaatttgagtggtaaaaatttgaagtttaaattgagttggaatattcaaccttgggtcggtcctctagtctatggtgaggctgaaggtgagactactttcacgattccaaataaaaagcaaaaaaacaaacacaacaataacaaaaataaaattaaagaaaataaaatggaagggattgaatcccaaccctctctatccgtctcaccttcctcttccatctcttcaactctctcttctttatcctctgccttattgtaataatttagaagaataaaaatagaaattagatagtaaacattgatatgagaacaaacaaggataataatcctccattattatgattcttattatttattttaacccaactagaatatatgtaaaaatttatgtatataaaaggaatataaattaaaactatcgttataaaaaaagtaaactgtcctttctgtactattctttattaatgtttatatagaaattatgtttgatcaaataatttccatttttcttccttcggtttgccctcccccccccaattattaattttttattgataagaaatattattttcttttaacttttgagttaacttgttataaatttcttcatcattagggataacttcagataaaccaaactgtattattgaccataatccccataatgcaattatcgtgcataaaaacatggcaaaataacctttaaatgtaaatccttctggtaatggttttggttgccgtcttaatccatccaaattgaaccagtcatcagaatgtcctgcagaattccctttattaggaattatggcagcttgacatatctctttataattttcacctaaaatttcaatagattgtaaagttattggatcttctaccataatagctgcaagaccctgttgtaaatgccaatcaacatgacaatgaaacatccaaacacctggattatcagctttaaatcttatcacaacatggccattaggttctaatatcactgtatctctaaggatcggtgtgtctggatattctactaatgggtgattctcatcatatggtacagttaatagttcttgtgggacagtagtatctaaggattcattaaatggtggcgatttttgtaccacttggaacttatgtccatgtagatgaaacggatgtctaccagtatcataattattcaaaacaatctcaataatttcatctctattaagtataaaaacatttgaattatcactgtatatccttggatccattgttaattttcccgaggtaacaactgacgttaaaaaaggtacctttggtagtacgtacgtgatattattgaaaaaagcataatttacgccatcacctaaattcctcattctaacatttaagacaatttgtttatcatacttagagtaaagtttatcctcattcaaaggttttaaataaaagtcattagttgcatgtttataaatattttcaaaccatggatttttttcagtatcatctaaatataaagacttagcctttggtaatgtctcatcatagatcaaatcattagtaatatttaattgtaatccctttgggatcacatctaacattgtatcatccattatttgcattaatgcatagtttctaatggattcttttgagttcttgttattgaaagattttgaacgaaccaaagcacacattctttgtcctgctgcaagataaagaatattagtgacattaggtttcacataagacccatcaacttcgacaatagtaaaatcatgatcttctagcataatatattgggaaacaaataacccagtattaatgaaccttaagagatacgttttattttgttggaaatgtaattcaccatgaaaagtatcattaaataaaagatgttgtggcacaggttctgcaccagtaggattatatctgcttaaaaactctttttctgtacttttataatctttgtagtacaaatctgctaaagtaatggtgatatcatcatcatattggaatgggatatctggatcatgaacaatgaaagcaccacgcatcccatcaccatactgagctccataatgggcatgataccaatatgtacctatttgatttggtacactaaaattatacagataggtttgacccggtatgatagggcattgtgttaccatagatgcaccatccatttgatttgatccaccattctctatattatggaaaaggccatggaaatgtaaagaagttggagtatcatcttggaatgcgttagttaaatatatttgtattctatctccctttgatacatgaatctctggtaatggccattgatcgttaaatgcaatcatttcctttattttagtttttccatcctcatcatgaaaagttacatttttccagctagcagtaaaataaaatgtttgcgttttggttattatttgattaatataattgctatcattaacctgctctgacttaattagctgacataacaataatgtttgtaacagagtccttattaatagtatcggacttgttttaattttcataatttattggattgggcttttatagtgaacttccatacacttttttgtataggaagatagatgctgttgaaatatacaaatgcttctgaagttttataacaagggtaaagatacatagagagaaagagaaaggaggaggcttgcctaccctttataaatggttactatcagtaaattacacttctcatattcaaatttctatttctatatcctctgttttgacacaaattgaaattagcaaaaaaaacaaaataaaacctattagaaagaatattttagtatagggttaaattattatttttgttttttttaatttttacattagggttttgaaattgtatacttactttttcaccttttctttctgtattcagtctctttttatctattgcttttaaaacgtaataaaggagttagtaacatatttgataacattactattctattagcaagctacactatcattcttgtaaaggacatcttttgtttcttaccagccctgcaaactgctactaagttgaatttccctccatactgtaattcacttattagttgaattacttattgtagggtgtctaaacaggcatacacacgtacaaatacgtatctatttataatagcaatagtaaataaaaatatataatacaatattgtgaattatatttccacctctccattctatttttctgcttctttttttctctctttttaatctatctctctttgctatgtctgattctagtgaaaataattctgactcttgggagcctttggtggatattgacctaggaaatcagcataatgatagtgatgctaacactaatagtaaagataataggagaggtgaaagtgaatataaaaataattatcaaacaaagaatatatctgaaatacaaataaatacttcttctacatcaacagagttagattcgccatttactccacggataggtactttgaatactgatgttattgaagagaataatgaaactaactcaagtgattctttaactatgaaaagagataaaggtattgataaaaaatcacttggatcagataaaataattttatccaaaaagaaaagaaatccttatttaataataacgaataataatattaataataatgatgataataatgatgataatgatattaatgaaaaagaaataacttcaacgttgtcaagcgataaaaactttaccaagaatttaataacaaataattctaccgctgttgataaaaatgcaaatctaattgaagaggaagtccaatcaccctcctttttaaataacatgtttgccacttttaaaagtagttcctcatcaatagataacaattctactaaattacccaatgattcaaataacaaaaaccaaattgtttcatcaccaaatattataagtcatagaagagataattccataagttcaaagagaaaaacaagtagaactagaaaaacgagtaccgattcatctctatttaatctagtaaattccccattacaaaaggcgccacagcctgtagaaatcataactcatatgcatagtaataattcaagtcacagagatttaaaccgaacagataataaattgcaaattgatatacagggtctgcaagatgataatgccacaagtccagtaataatagaaaatggcaataataagccaaatgaggataattataataaaaaaaaatttgtagaagaaaaatattctgacactgattatcattatgcaacaatagaaagaaatttagagtttcatagtctatttgaatcgattcctaatgatgataggcttatcgacgattttagttgcgccttaagtcgtgattttctgtaccaagggagactatatatatctgaaaggagtttatgtttcaattcaaatatactaggttgggtatccaaagatattataccaatgaaggatatcagatatttagagaagacttctgcagctggactatttccaaatgccatattaattgaaacggataacgaaaaagttcaatttaacaatttcttatctagagaacaaacttttaatttaatcaaggaagtatggtctaaaaatttgatatttgcggattttgataaagatactgctataccaacagaccaaaaaaaagggttccaaaatgatagaacgacttttgataacgatgaattccatgataatagttcagttagtagtattagtatcgacgaaaagatagggacatgttctataggacactatcgattcaaagatggagcagactatgtgaatgaacctccttatacccataatgaaactattttccctggaactgacaagcctaatgaatatattcttaaaacaatcgatttaccatgtactcctttacaagcatatcaaataatgtatagtaaccaaaattattcattcctctacgattatttgcattctattgactcattagacattgaggagcctacaagatatgataaaatgaacaaaagaatatattcttttgaaaaacgtttaaactttccaggtggacccaaatctacaagatgttttgcagaggaaataattttaaattatgatccacatggatatattatggttcttactactacaagaacaccaaatgtaacaagtggaaaagccttttccacaaaaactaagtacatgtacagatggggtccaaaaaataactgccaattgcagatatcctattggcttgaatggactagttcaagttggtttaaaaagatgattgaagcaggtgcaaaaaagagtcagatcgaagctacagaaaaaataattgaaattttaaatgattacattaaaaataatatcattgaaacagatgaaaaaataacagatgctagggggtttatggaatcatcaccaattgtaaagataacctctattaagaacgatctagaaaagaatattgtcaaaacggatgttggtacgaaaatatcgggcaattctattttagtaaatcaatcttcttttacttttttgattatagtatttattattcttctatctataaatatctggaatcaaatttccatgagaagaactattttaaacattgaaagattgcttgagatagaaagactttcatgcaggtcaagaatgaacaattaattaattcaccattcgatacactacattattattaaataaagtagaaataattaacagttgcttttgtggctcctctttatgacatctacatctttatattattatttttattgtattttttctataaaaagtattctatggtattatacataagttgatatatattaattattattattatggatattatataggctatattaaatattgtgattgtcattattactgaagtatcgctatgttcatgagataaatcaacatgtaggaaaagataattggggtaactctggataatgaaacatatgaccactattatttgagtcagaattgttagatctattactcttggcatggtctaacatattagcagttacgtttatatgagaatcactgctgctatcgctgttattatcgtgagcactacggaccggtactggtttaaaaaactcaagtgactggttaaacctatgttcattaaaagttggaggtaataatggatatttgatatctgaatttgtattattatcattaaccattcttgaatgatatcgtctctcatttttattgttaattggatcatgtatattaattttattggattttgcaatatttttagccaatgacaattggtgtttgaagtaatttttgtcaatatggatttgtaaatcttcaagtaacttcaaaacagctggcacttctaatttcattagttgtaaatattcttgtttgtaaagttgaatttctgaatctaaattaatattattaattagatattgtgggtgtttagacaatttattggtacaaaggtccacataacgataataaaacatatatgctaactctgtatctccgcgttgaacactcatttgagccttgtctaataatccaacacatgtctttaaatacaattttaacggtattttaggattgaattgataatctttagcttcttggatcaattccctactactcttcattataatattcaaaaaataataatatatataagcgggaaaatattttgttggtagcttgaattgttttattaaaaaaagatggggtagaattgaactataatagccacacaaaaatattgaaatccaatttgcccactggtcgtaaacaaattggatttcgaaaatgcattgcattgcgactctcactatcaattattctattttatctcatcgctgaacgagtggatttctatcaatttttcaacattatcggctgtccatctccagttttttttatttttttgtttattcaaaatttgttgcgtctgcttttttatttttttttttttaattatttattcaaaatgttttacctaaacctaaaaacaataatatgatagaaaggaaaatagtttaaaaaaaattaaaaccctcaataataaaatatgacacgtaagcttttatttttaggttttttttctctaaagatttacgcgtttgaaaaatttttctttgcagcctgcaaactttcgaggtggagacagtttcatctaaccacattctaatagtaatatcttcaattggagtataaatatctacaagaagctgatattaactccaccaaaccctttttgtgacgctatattctgggttgcttgtgtcttgcaaaattactcttattttgtatcccttctttagagaaacctgcacattcaaatatatctaagtgactgtcaacagccttattttctcttatctctgattatctaataataacgatcactaaccaatgtccatctcacaagaatttgcttacaaagaaagaccagatgttttggttctttttgatgtcgatggtactttaactccggctagattaaccatctctgatgaagtcaaagaaactttagccaaattaagaaagaaggtctgtattggttttgttggtggttctgatttaagtaaacaaattgaacaattaggtccaaatgtcttagatgaatttgactattctttctctgaaaatggtttaactgcttacagattaggtgttcaacaggcttctcaatccttcattaactggattggtgaagaagaatacaacaagttagctgttttcatcttgaaatacttagccaatctggatttaccaaagagaagaggtactttcttagaattcagaaatggtatgattaatgtttctccaattggtagaaacgccagtactgaagaacgtaacgaatttgaaaaatacgacaaagaacatcaaattagagctaaattcgttgaagctttaaagaaggaattccctcacttaaaattaacttactccattggtggtcaaatttcctttgatgtcttcccaactggttgggataagacttactgtttgcaacatgttgaaaaggacggtttcaaggaaattcacttctttggtgacaagacttttgaaggtggtaatgattatgaaatctatgttgatgaaagaactattggtcactctgtttcctctccagatgatactgttaaaatcttaaacgaattatttaacttataattgattaaagtggaaatgaatcagaagttttaaattattaagttaatattaaatttatttcaaaattcagtgtaaatttgtactcaaaagaatatcaatataataatctatgcataaattaatatctttttattggtatatatatatatgtgtgtgtgtatatctaccatatatatattgttattataaagtattgtatctacattatgttataagtttcaccttgttataatataacctcttcccctattagtatatagaaacttgataagaattcgttgctttaaaatatatcctattattaataattgtaagatctctaatactaggataaataatttcccattatagaatagactatttttcattatttcaatacgttgtgtacacaaaagaagtttttctatgacagcaatcttatataagctaaaaccaaagcaaatgtaccagtacatacaccgattaaccattgcattacttgtgttttaacagaatcaatttgagtcttcatattagatacttcatgatctatcctagtatcaatctcttttatctgtaaatcatggtgtgaactctcttctcgaattcgtcccttctctaaagatagatccaatttgaatcctgcattaaccttagtaatttcttcttttagcttacttctcattttttctaaatcactacgtactctttcatactcattttccacattatgaaattcatttctatcagaagtcaacagttgatctcttaatttggcaaaatcaactctttgttggtatgttaattgaatcaatctttctctctttgccaaatccttagacacatggactacgccactttgaatagcatctcgtattatatcaagtatttttgaggcctgtttttccgtgaaatctccctctctcatgaggagttccttataatgattggaattattaatgtgggctggacccatagaagaggaattccacactctgttaaaagattgtagtggatttaatctccagttggtagctggtttatatacaacacaaagagatttaagcatagtgtccataaacgttatttgtttcgatctttacaatttatggtctctctgttgttattatatttgtttgtataactaatgtatggtttattttataaaaagaaataattttaatattttttattatttatagtcgctattaaaatccaatttaagacaacaaaaagaaatatatctatacttaatacttactaattaaaaacaccaaacaactatcttactcaggtaaagtgtaactatatgcatgcaaatattcgagaaaatataaaaaaaacactattaattaagaaagaagagaagattatttcccattctaagattttgttgtagatacttgtctctttaattgcttaaatattaatttcttgtaggttaataaatcgtggaatattttgaatcctaagttattatcatcaaacactttagcatgaataatacagtgtgcaaattctctagaaatttcattaacaaagtattcagcagagacataagaacccatgtcctctgtagccaacgtgtcattattgattgttgtatcttcctttaatacagatatacatttctccttaggatttgccattttaataattttgcataatctataaaaatgtgttgtaattgcatccaatgtagctaaatgtggtttcgataaagatgataacgtagtatataatcctgttatccttttattttcagaattgctcaaagtgttatcaacattatcattattatggctattgtctgaagcatacatttgaattttgtcattatcttttactggctctgtaatcacatctattcctactgctggtggatatttttcatataatgctcttaaaatatcaagtaattcatttgatatcaaaggttcaggtaattccagtaagtacaacttaataacactagcaattacgctgggttcatattgtccttcagttaaaatgtttagtatctctgcttcctccttgaattgagtttggtttaatttctttctcaattcatgcgttaaacttaatttgacacggtcaatccatgcagaaactctaattttatcattttccaaatcaggataaatttgatccatacgtgagagaaggacgctaattataagtggcacgacttttttgtctaatctacatcttgtctccaaatcaataccaaagttttgataaatacctgggttataataattattataagtaataacttttggttggaataaaccagtattataagtagtaatcaactctaacaaatcattttctggatcaatggtgtcctgacagtcaatatttttatcaatctgtaatttcataatggcaattttgttacctattgtagaacaaaagtccatagtcgctttcttaatagcctttaatctatcaagttcacatttttccataaatgaaagatgatcaatcataagttcttcaattgaacaccttaatgaatccattttatgacattctttaaaatatttactatctgattttgctacatcatctaacaatttaaacaattcactttcatactctgttactgttggttcttctaatgaagtgatttgattatctgttgcatttgtttggttcgaattcaaaggtatattgtcagatatttttattgtggccaaagtttttttcgtctgagataaatagcgttcaaattgagatgaatttgacaagttatcttcattatttttatttggaataggaacttgggcaaaattgtaggcataatctctccactgatactgaaatttttttgaattcacaaaactattacccataccattacaatacttaagaaacccaaaatttaaaagatcttgaccaaactcttcagcttgatcaaaatctttcaatgacatattctccaacaaaaattttgtgatctcataaccattatttgtattttgcaaattaaaattaatcaagggtaatttatattctgtcttaggtaattctaataacaacaactttaatagttgcctcaaacttttattatcaaattctatcttaccaatttcaccaaatatcaaattttccttttcacgttctaactgaactttgtaattatttaaacattctaaacttttcatagccttattataagaatcatcatcattaaaatgaattcttttccaatcttctaactttttacaatttttaatatactccattgataacttcttaacatagttattgctcttttgaaatccttttatgttatcaattagagttttctgtgaatatttaattctttttctatgatcgttacaccattgactgaaaggttttaataccaaagactctatattggatgctattgttaaatgttgttcaccttccaattctgtttgttttatgatattgtctaaagcattagacgtactattgttcgtatctacaatatcaataccagatctaacagcacacagttgtcttccgtaagagacttcatattgcatccttgaagcaaataattggataaaagagtcacattggtcacaacctttatatagattttggaaaaggacgtcaagtcctgatgataaatcatcagaccagaaactgtctgagaatgatggcatgggtggtgtgtttgttggaaatattgcaaatgagaggcttcccaatctaatttgataaatgaagttcctttttttttgttttctgcttaaaaaaaaaaaaaaaagttaattgaatctcaaagagcctttttattttgttttcttagtgaggttgatggcgttgatctatatagaccatcatatatttgatcgataactatttttatcctgaataccaatatattttctgggtaaaaccctgcacgtcaaaaaaaaaatcgcacattaaatgagacaaaaaaaaagaaacattctccgtgttcggattttccatggtgtctgtttcagaactattgtagaaaagaatggtttagaataacaaaaaacaaaatatgcattactatatccaaacaacttaacaatatatgagaatcttctaattacaagcggatattcaacttattttctaaaaaagaccattgtatgattttcatttgaatcataactgttaacatcttcagcctaaagtgtcattccttctttctgcgtgtttataacagcaacaaaaagcataaaaatttgctgatctctttttctttttgatatattaatgaacatacctctgtattctctctaataatatcattaatcaggaaagtgtaattactgttgatatcacaagatgacactggagtatcctcatatattcactctattaaaacaacttcggatctttactaatttttaaccgccaaccttttttctaatccacgtgattttttttcttcttttttttttttctttttctaaaaaacaattccgtatatttccgccatttccgcaatccttttgtttcatttgaaaaatttgcctcatttcgtcctaaatttctccatttgttaatatcaatacaaataaaatcaaagaatccccaagagctgaaaaaaaaaaaattattgcaaataaaatttatagttagttggacaactcttttgttccatatactataccgcctgctctatattcatttagtattcaattcaatatatgttcatcttaaactaacatcagactattggagtatactagaataaaggtttgaaggagtaaagagacagtactatagtggtaaaatcacctgtgcacactgaatttaaattatgaaactatcctattatacaggctttttggcttttctttctttgggatcatcttcatacggtcataatgttgattctgggaacaataaaaatgaagacctgccagttataggatactctttaccaaatttaatcactagtggtaactctattccatctaattgggaaaccaaagattctgcgaaattggatgaagggagatttatattaacaccaagcaaatcttctaaagggtctctctggttaagaccaattttaaaggatctggaaagttttactgtcgaatggacttttagaagtttgaattatcaaggcaaacattcgggtggtctttcattttggtttttaggtgatgttgataagattggtaatgaccaaaaactttttaatggtccctccaagtttaatggtttgcaattgttggttgacagtaacagtcaagtgtctcaatcaattcacgctcaattaaatgatggatcgaagaatttattagattccaatgaaaaaatttatgataaaagttttgcctcctgtttaatgggatatcaggattctacagtaccattgactcttagattatcttatgattctgagtccaataatatgctaaagttacaagttgataataaagtttgtttccagactaggaaaatcaagttatccaatattttacaaaagggtttaaaaattggggtaagtgcagataattctgattcacttgaaacctttgaaattctacaaatgaaattttataataaacttattgaagatgctttaattccaaatgtaaacgcaatgaatcaaccaaaattattaactaaaattattgatgaaaagaccggtactgagaaaattgttgataaagaggttcttgattctcaaaataagcatatgtccagttttgaattatataagaaaatggatagattggaagggaaaattatggcaaatgacattaatatcatagaggaaaagatcaacaatatattgtctatccaacagacattgattaaagaattatctattttaactaagagcatacaaaataataataacaacaatatgaataaaggaggaagtaatgacaatgatcagtttaaagatttcttgtctatgaatgaaaaattggagaagatgttaaatgagcaagcaaagattagagaggcaactaaactggctcaagcaaatcgcgaagcaggtccacaaatagatgaaattgtttccaaattagcagtttggttgatacctttgattgttatcatgtgtgttatggcatattatacctttaaaattagacaagaaattgtaaaaacaaaattattataatttctcatatgacatatatatttatatatacatatttatgtacagttaaatacatcatattgtaattatgcataaggtggtttgaaggacttaatatttgagtaacctaataaattagggtttgcctgtcttttagtaatccttatttcatcggtgttcgtcaattcgttaaagtttgtaatgatatcttcatgctgaagcatcttagatatataccttttttcaatatattccacttgtttaccttcatttaataaaccaataggaagaccatgcttatactgccagtatttcatccatcttttgcttcgtatttttcttaccttttgtaaaccaacattcacaaataaacaatcgtgtgaatgttctgtctccttaatttgatttggtgtcaagtaattcaaccttttcagtaagttgtctttttcaaagtaacttaatccctttatggaatgattattctcttttacttgctgttcatcgccaataggtaaagaatcaaatttccaccccttaatgttaagagaagatgtctgctgtttattcatattgagggaacttggttcctcttcaatttttttatctatgttagagtcagtgatactgcttaacattctattagaaatttttgattcactggtcatatttggatttgtccttagattaggtaaactaggttgagctccttttagttgtgaggtttcattcttgttataattgtgttcaccaattggagtatccatacctttgatttgtgtagcttgtaaaaatgaattctttgaatgatatttagggactctaaactgggcactcaattcaagtgaaccggcaatagcttgaccgggtactactgtatcagtatgttgtcctttactaaattgttcctcatactcttcccttatttcttgagaaggttgctctatgatgattgtataaggagaatcaaaattgaaagttccttcttctttctcttccttctctatttttatatcctgtggaatttgctgagatgaacgaacactgcgattaaatatttgcggtttcaactctttaagtaatgatattacttttgaagaacatttaaaaaccctatgatgtgttgtgaaaccttgttgtttcgccaatgtttcccaatagtcatctacaatcctggtaccttggcttattatttgcgctccaaaagtaataaatgcagatttagttgttacaatcttcacatcattattattgacatcattataattcttatcaagtaaatgatttcgtttcataaattcaatatcatcactagtagcctgtatcggaaggagttgttgcttatatttttgaataaaagtttcttgatcaatagaatcatcttgaaccaacgatattaaatcccttaataagacccaatatttatccccatgtcctggtaattgaaaatagttaaataagaaatctttattcattcccgatatcaatagtttcccatttgaatcaatcttagtaattcctaacggatcgatttttctaaacttatactcatccaattcagtaccatcatttattctatcttcaaaatattcaggaggtaccataatttgttttaaaggaaggtgatcaagctgtcctgctattaattcttcttgaacactaatttgtaaaatttgctttaatagatacaagctatgagcaagtaaaagttcatcacttgcaaaatgtacaagcggcttagttgactccattatttaactgtttattatctctgtatttctgatattgtttgtctaattaatgttttaaaatctaatgagaaaaaaaaatgattaaacagttacagactatctctttatagcattaaatttatatcaagcatatataagaaaagttaccggtataaagatccttcttaacaacgcatcttcaatttatatttgctttcgatatttgttgataaatacaaacattttcatttcctcagcaaaactttctgttattgaaagtgaaaaagtgaaaaaacttgaaatacaagaaaaagacccttttacagtataactcacacttcaaaagaagagatcaagcaggtagagcaaatataattggttagaagaactagcagacatattatacatttgatgcggaaaacattatttataattagtgatatatccaataatggtattaagatgctttttcctgttatctattatagataaataccttaaaagagttatataacaacacatcaaatccctttttatacatatgctttagagctagctcatactagtataaccaattatgagtgtatgtttttaaagaaaaaaaaaatatacagtgatatcaccaatagtttaatttaatgaaaagtgatatacaataactaatagattttttgaatatctatactcattggatagtgaatgttattaatatctaagttgcatgaatattatggatatgtaaaacagtcgttaaacaaaaacagagtcaaagagtaaatagttctgcataaataatttttggttattgggaataactctgaaaataaaggaattacaatatctacacttccgcccttcacaccaactacgttcacaataaatacatcgtttctttaaaaacatgattttttctcacacaataagaataatagccttgagtctttttggctcgatgatatatcaccattttcacgaactaatttctaaaataggtatacaatttcggttaacgttcttttagcattttattaaatttggctattaaacatctagaacgttctttttggagctgaaatctaatctaaataatcctagattttttaaattcatgagcattttttctgaaaatgcaactattagcaaatagataaaactatccttattatattttttacacaattttacacagaattctcatctttatatggtatatcctcgaaatctactgattgaaagtatctcttcttataggcgtgtcttattgatatattctgttaatttaatataattgatagttatacacgttcataagagaagtgtaatctattgtctatctgaattttaattatttcttatgattgtttgatgtatttgaaggtgatttttaaagatctagctaaaatctcttttctgctttgatgttttataaagactgaaaagataagatcaattagataaaagataaaagagagtttattcaatagaaagtgatatagtagactgaagtgagagtatagacggtcaaaatgttattctctatatgagatgtgtgtgttctacaatatcattagaaggattataaaaaattaatcgtaagtaaatactatccataaaaagggttaaatcaaaagagatagatatttagtagtgtgttagcaaatattccctacgatttttcaagatatgaatgtattggtacgtcaaagtaatgagagtataatgatgtctaatgttgtaataatcagtagtatcatttcagaacaaattcccattaaccgaaaagataactttttcacaattgtcattacaagaatcagtagttttctagtgaaaaggcatgttatttgatttgatgttatgcggataacctattaactcaatataattcaactttatattatgaaataataaaaattattgttattcttagtaaatatatttaacgaaccacttaaatataacaattacttaaacgttttttgcagtttcccttatcaatcaaatgcatattattgtccactgatcaataaagaaggcatattttgttcttatagagtttttaatgatgcaaggcttttttgaaacttcttaaccagaaacaattaacttagaaagcatattaatagttataacttgagagattatgaagatgaaactatagtaaaacacttcaatctatattgcttcagaaaactgtatgaactatatagcccttatagcaatatagtaaatttatcaccggtagtcagcaacaaagttactataaattatgtattttttttttaaagctttatctaattccttgtgtctttagataataaattccatactgatcttttaatatttttaaattcagatttcaaagtaaaagatcttcgttaagctgttaaatattggattactcaatgtggattggaaatagaaaaggagatatctatcttacatttaaaaaaaaaaatgctacagtttcactatatatactattaagaaaatggcgtatgcagtattttaattttacccttctatcgttaactgtcccataaggttgtaaaattccatatgtgctgtaactgtcactcgctggttttactttaaaaatatcctattcatgaaccaggaaaaaatgcgatgaaaagtaaaggtgaaagaaaagagaagaaaataagatgagagagaaagaaaatagcatggcatcttataacattattcgaatatattgcataatcgcatatatatatatatgtatgtatttatgtctatacatagaaaatcgtcaaaacacattgtgtgaaataggtaaacctaggatagatgggtcttgtagacttgtaggcgtgatataaagattaagacaattttgttgatatagagatgacctacacaaagagcagtaatgtatacattcaaaatggcatttttaaaaaggtattatgtcaaaagtataatattaccacggtttggtgatggtggagagatttcaatacttccttcagtttttcatgtttgaaaagatgtattctatccttatgatatgcagaaaactgtaacatgttcgcattcgcacaaaagtatgtgacaaaaattattagcagtgttcttgtggatgatttagtatgaatatagagtttagtagaattaatgttactgattcatgagttatagatatgtacagctctattcgttctaaaaaaagataaagataaataagaagggtatataaggcaatattatgcaatatataaatgcaagtgtataaactgaaagtattgaaatggatatttggtattaataattattattaattccatggtgataagatatagataatctttatggtaaagattacaggtgctataataatatgtttgtagtattataattaattgtattgagtcatttcgtctatgagatgcattattgctagagagtagatagtacacccattaggtttctttattaaagactctttttattatgtcattaagaataatagttaaaaagaagagatattcttgagaagggaattaaaaagatgaagaatcaatttttattcatgcataaatagattatataattatgtatattatttttatagatttttaataaattagagatctaatttactaataagttaaattttgataatattaaatacaaaaagcactactttccatggtttagagatatctttcttaatttaaattcatcataataaatagcaggaaaagtaatagatttttataataaagaaacacagacgtaaaatgggttgtattgtatatgattgttggaaatgagtgcctgtagtcattggatatatagtaaacattctcaatattatattaaatagatttagtatacaaaattataataaagttcttcggtttgtcttatttatatatataatgtataatgataaaatatagaagatgagcaagggaaaaaacatgatataaaaaaaatgttggctttatatattttcatatttggtctgtctcgtctgcttacggcaccaaatttatgatgaagtttgtttacgtctactgataagcaaacaatacgttctccactttttgcttatcaattaatgtttaccaaaatctaatttgtctattatttattctagaacatttgattctagcaatgatatctgatatattaattatatattaatatggcattgagaatgtatactatttgtccaataactaaaggtgctaattctcatcatttttcttgtaattgaaaatagtactttaaattttttttatgtcttttttatatatgggtgcttttgtttatttattcgtataaatttatttaaaattataaaaaaatctaaaagcaaaacactacaactttagaaatagttggattatttagctcctaaatagtatgtattataataggatgtttttacataagaaaaatagatcaaatcacattttggcaaattctaaagaatgcagtatttactatataacgattatacatcattaaagcttgatggaattattttgtcacattttatcctctgtagaagagaattaacaaaatttgatatataaaaaaacaaaaatttctcataaaatatttattccatttacactttctctctatattatgtataaaaaaagaaataggaaaaaattcatttcaatttttgtattattagctacataacctgatgagaatgagcgcctttattcattggatatatagtaaacattctcaatattatattaaacagatttagtatacaaaattataataaagtccttcactttctttctctatatacaacatagaaataattatatacaaagattgtaaataagataaaaataatgtatgatgaaatccttggctttatatatgttaacattaagccattttcctctacgaacagtaagatatttaataaacaaactcaacaacttttggtgacctctcaacaattattactcaacaatttatcatttaatgtctgctaaaatcttattgttctatctattttatcatagaacattctatttcaacataaccattataattaagagaccaactaacatattaactacatttaggtattgattctgctggattgatatgttaccagtttgagtaacatgtaaatatatcaaagaggaaaaatgtttgttttgcacattcaacgttatggagataagatcaaacaaaatcaaaataaattaatatattatgaaaaattgccaaaaggtaaacatatataagtaaacgactttacttattaatttttcaatctggatgaataagttatatacactttatcatatgtttcttttatatttatataattattaattccgaatcaaaagattgagggaaaattacactacatatcaatataataataataatacacaatcataacatgttgtatgatcaccgacgctaagaacatgtatactaatattattcatccagaggagattctcaacacaacactatgctcattacatcttttttgaacaataaaaaatttaacaagtatcaaaaagtaatatcttctttaatatattctcattgctttttttttgataaaatccaaaatcagggaatcttgtttttattctttttagaacatgcctaagatatagaaatatttccaggatcgacctctataaataattaaaattcatctaaaaaaaaactaaatctcaaaacttttcttaacttcttattctattcaatatctacttcagtaccaaagaaatttctataaaaaaaacactagtatttaccacaacatacatcaacgaaaataagttaacaaagatcacattttttagtttttaagataataaaaaacaagacaatttaatacaaaacacttcactacatagtgggtaccttttatcgaattactatatggtaacaataaagtaaattacatttaatatatacaaaaaaataaaatagtttatgatattatagccaccattttattattgatgcacaaatatgtccaatatccaaatattgagccaattaaaaatgaatcatttctgagtatcatatttttcaagcatccttaaaataactaagagttttggtgacaaagacagtaatactttaaaatcgacaaattgtggtttccaaattcagtgatgttattgaaaataatgatttattagatggcagatcgaagcaattaacttagccaagttcaattctatcaaatgataaaaatgcagcatattcttctatgcttccaaaaatatgaattttatgataactctatcaaattatactgataggtttcctctggataaagaatattagtatacataacttcagcataagtgctcataatttatgagtagtattttaaattattattattattataagattatataaagtatttttccctctctgtcctctctggaaataaacaattatacaaatataaaagaaacataaaaatacaatgtgtagatagtattcatctagattagaaaaataatgaataaaattgtctatttgtattgttgatctattacctagactcaatgaaaattatgaataatcaagatatagaaattagaaatagtttttttacttataactctatttacaaaatacgtagtatatctcgtatatactatttgtattatttaatacagtgagcgattacttataaaatatatcgtcaacaatgttctattataacatataggttattaatccacaccttttaagttttaacatacatattctttactttcagaaaatttttttcatagcatttttttcattttgattttgttttaaatgtctccgcaatactggattgtacagaacataaagttttctccttttggctaatgatccatttcctaaataggtaagatgccattctagtgaaattattaatagtgggtaaactatgtcaaaatgaaacaataggtacatttaacaaaaatagtcaactctttagatgaccaattaactactctaactagatccgatattaaaaataagacaggaaattttggagaattgtgatagctgtatttaatactaatatgagttaacttattagttaattggatctccgatttattaaaaatctataaaagtaatatacatagttatttagtatgtttatacatgaatacaaattgatcctttttctttttgatactcttaaaattttttcttcttgaaaattttttttctcttttagttatcattattgacaacataataaaacagtgtttaatactgaaacttaacaaacatactgtccatgctctaacaggaaaataatgaaaaaaaatacaattgtatgctaattttttttgacacaaccattgttatacaagctattgcatgcataacaatatattgattgcaatatagcggaataatgctagtttgtttttgtttagatatttgaacagttcctttttagtgaatcttaaaatcttttggtgatttcccaattttccatacttttttgtaaacttagttttttaacacaattttttttttattttctgcatgaaacaatagctccatagtaatttttttttcactatgaaaaatctgctttattttttttttcttttctttttcttttctttctcttttctttttcttttatttttcttttatttcttttatttttcttttatttctcttttctttttcttttatttctatacaaactcgtgcaatactaattagtcgtagacgtaagtttctagtgaaaatatcgcaatctaactatactctgaccaaaataatacttccacatttggtaattctatggataattttcaggaaaagatcaaaatcgctagtttaaaataacaatacatcttgcacttagacacagctaacagaactttgatttaccaaatatagttcaaagaaacttctagactctcgttgacacaagaaaactgaggagagtgatcacgttattttggaaacaatacagtattatgcaaaaaaaaaatagaaaagaatagccatacaagaataaagttttcctatctctctaaaactttttattaagcttttaatatacaccaaaaccgaaattcaaatattttttgacagtggcactattttatgtgtttcctgcattatgtgctcttgtctccttgaaacatacgttttccctgattagaactttaaggttaaaatcgttcccttgctattttattacaattacatattttcatctggtattttaataatattttagaaaaatatccaaacaaataaacgagaaatttccatgttgcaatattaaggctagtctctttacttttttacatattggttaattttatggcattcttccgcgctagcgcaacctattatcgttttacaaaactattaaacttttttttagttattctgtgttgttgagtacgttttctctttaacaacatttcaaaaaagaggtcagaaaaaccttttcaggtgaagaaaacaaaacaaaaaaaagcaatatttatttccgcaccttattcttttttaaatggaagctattgaatctaacatctctgcaggattgtaatatttgcatgttattttccgataatatgtatatgcaaaaaaaaaaaattcagaaatatgtataaaatatttaacactattattattcgtataattattagtgaacaagtatggccctatgttattaatcaatatttttcttaaaaaagttaacaataaagctttctagatcttaattttaaataaaattttatgaaacaatattggttatatacaagatatgagaagccatggacaatattcaatatttttattctagatgtgaaaagtgatgtgaaaaattccactttctattatttcatttctggtaaaaaaaacaccttgtccttgccacaatgtataaaaaaagggaaataaaactttaaaaccctatcaattatgaaatgtgcaccatctgtatagcaaaatccaaataaatgaaattagaacaccctatttcaataaaattgccagataaaaataccattttattgtgtataaagtgaacaactagttcataatgaacaagctaatagtaaggtatgtaagttttatgtatattttttactcttgatcataacacataaaagcaaaagaaaaaatgtacactgcatatctatctactactattggaaataataactagaatttccaggtaagatacatttatacttgtatatgttgtgatgctccacaacaaagaaaagattctaaatgtttatatttcaagaaaaaacagaggaaaacactttagatgatttttgtaagccctactttgtcttaatttacaatgatagtgtttaccataatttttacccaaggatcttggcagacctactaaaataagacacaaatgaataaaccaatcttttacactaagtgaacgccaatttgaaaataaaaaaaccttaatatcaccttagagggaaatatcattgtgtacatagaaggtaaataatttttttcaacaatggtttctgatgttttttgctgctcctccttttaattacatctattgaacctattgttttcgttttttttttcaaaaaaaaacgaaaaaaaaagaaaaaaaaaaccgtgtttctatctgagatcacaaaaaaaagaaaaatcaatatattttttttcattcatgctattgttacaagcataatattttatatttactttgcaaaaatcaatgaaattatctactattctacagaaacaaaatatcttcatcagatcagtaaacaactctttttttatcaagcaaacatgatatttacctctttgtaggaagtattatgtagttcaaaaaaaccaatatctgattgcagataaataattgttattgatatagtcacttttagttataatgccatttcactgtaacatactaaatatgcaaggtagtaaacgaatccaatcatttcctataataggcaatatctcagatcatatcaaaaataatgataatattaatattaatgaaaatattcttattcaatttattgttcattattctcaaggataaactaaaagtaaaatgacaaatagatattatgcaatcatgaatgctaccttataaacaacttatttaattttcttaatgaaaaaaattaatataaatacgtgtatgtaccaacgttttggtaactaacttcccatcgatttgttttccccattagattatgataattatacatgttactacactttcataaaaataacagtaacaattgaccaaagcaaataaaaatgatgagttcttttaaaggtattttggtacttttgatgtttttactcatctttgtggatgctgtaacaatctctgataacacttatttaggcgatatttctttctctgtcccccttactgttgatgaaggttattttttggcgttagtgagcggaaactcttatagtttcaccaaagacttgcttgtgaaaggttcacttttcattggtgatactgattcatatggcaacggatttagcactacattcgatggttcaactcttacaaacgatggtttaattgtagttgatagtagaaacattacagctagttcaatgactgtatcatggagtggctctttcattactaatcatggaaaaatatatttcaatggtttggatagcaattctaatagtttcacaataaacccaagcgtggctttaacaaatactggtttaatgtcttttggtcaggatcctacttcagattatagtagtgttgtccatcttaaatccggatcttttgttaatattggtactatttgtttgaagaatattaaagcatctttggagagttctatagcaggtgacggttgcattacaataggtgaaaattctgtatatggtgtaccgatacagttaacctctggtacaatcggcccacaaactatatatatgacctctccttcctcaatgttttatgtaggctcatatggtaactcaaataatgtctatgtcagaggttttggtaatggtaattatttgacatttcgtacttctatagtaggccatagttatgatccagatactggtatcttgacggttaacgtggccactattcataaaattaatattggtactggttataacccacatggattttcaatgaaatctataaataaccacattggttttaattttatcaataacgcattagtctacaatggaactgctccaaatggttttcctagtgcctgtatgccatgtgattcatctccttggatacctattattaattccacttcacccagttcttcttctttatccacatattcaagtgtctcttctagttattccaccagttctataccatctacttttggctcttccagttttactacttcttcaccatcactaaaaccaagtgctattacctcccacatcccaggtatagttgcttctgatgcagcccaattcacctctacctcctacaccacagactccaacggtaatagcagtccagttgacattgttgttcttgctactccagttcaaagcactgtcacagcatacagtgctggcatggtaggttcagcttctgttctttcttcatacatctcctacatcactgactcaaatggcagcagtagtgcagttggtgttattgttgttgaaactccagctgttagtcaaatcacctcctatatcccaggtatagttgcttctgatgctactcaatccacaattacatcctacaccaccaactccaatggtagcagcagtccagttggcattgttgttgttgccactccagttcaaagcactgttacagcatacacctctgtaatgactggttcagcttctactctatcatcctacatctcctacaccaccgactccaatggtagtaccaaagccattggtgttattgttgttgaaactccagctgttagtcaaatcacctcctatatcccaggtatagttgcttctgatgctactcaatccacaattacatcctacaccaccaactccaatggtagcagcagtccagttggcattgttgttgttgccactccagttcaaagcactgtcactgcatacagtgctgacatggtaggttcagcttctgccctttcctcctacatctcttacaccaccgactctaacggcagtaccgaggccattggtgttattgttgttgaaactccagctgttagtcaaattacctcctatatcccaagcatcataggctctgcttctgctcagtccacaattatatcttacactgctgacgccaacgatggcagcagcaaagttaacattgttgttgttgccactccagttcaaagcactgttacagcatacacctctgtaatgactggttcagcttctactctatcatcctacatctcctacaccaccgactccaatggtagtaccaaagccattggtgttattgttgttgaaactccagctgttagtcaaatcacctcctatatcccaggtatagttgcttctgatgctactcaatccacaattacatcctacaccaccaactccaatggtagcagcagtccagttggcattgttgttgttgccactccagttcaaagcactgttacagcatacacctctgtaatgactggttcagcttctactctatcatcctacatctcctacaccaccgactccaatggtagtaccaaagccattggtgttattgttgttgaaactccagctgttagtcaaatcacctcctatatcccaggtatagttgcttctgatgctactcaatccacaattacatcctacaccaccaactccaatggtagcagcagtccagttggcattgttgttgttgccactccagttcaaagcactgtcactgcatacagtgctgacatggtaggttcagcttctgccctttcctcctacatctcttacaccactgactctaacggcaataccgaggccattggtgttattgttgtcgagactgcaatatatggaaactccactaatcacggtggaaaggctgtatatactttgagtagtactttggttgctttgactaaagttgttaatggagtcactatgattacaacttattgtcctgaaccatctgcaacttctaaaacaagtatgactgctctcatcggatatggttttattgaacctatttatactaattcaaagaaccaacaagaagagaccaactcattttctgttgtgtccaatgcaactccagttacttctattgcttttaccaccactggcacagtgtttaccaacaatgaaaatcaactaacatctagaaactccagagaatctaccactgttgttgttgttggatctacaaggggtaacatagacgttacttcggaaactagtactgttgtcagtactgttgaatccagaagaccagaaacatctctaactacaaaaatgccacaagtttcccaattcatttctgagcaattctcgtcatctccaactgctatgacagcctctcatgtaagtgtaccttctcttgcatcatataagggtaagggtagcaccatatacatgaaatggagcgttgcccattttgttggtctattattatttatgattatttaaatcgaatgcaggtaaagaattctaaaagaaagaattctaaatagttaaataattaaatactactatctaaacatatataataccctaatattatatgtattgtatattttttcctttgactcttgttttccagttttgttaaatactttggctatgcttaatcaataaatcttgattagcgaacttaccatcatataactttgaaatcaactgatcatatttcagaaatatacgtattttaaaccccttttaatcaagaaaaattgtaattatgaagatttaatgctagtttaattcagagatcataataaaaggattgacacatatcttaaaaactattataatatttctctacctatgttagtattcgagaacttgactagatgagtgatcattaaatgcgaagcaagaatgtcttaaatctttttctttctatattcccttattatttcctctctttcccatatatatacgtacacacggggatgaaaataaataatatatatatatatatatgctaatttgataacactattgccccttaagtcaattaactacatatatatatgtacatttacataaatatgctaactcttattactttcatttttgactaatgattccacttccacctcttttatttttgtaacatcatatttgaccctaaatgaaataaagtattgaaaaactattattctcacacgaatagtagaaagataccataaaattactccgacaatattcaaagcaatgaaagtttttttgattaacacaaaaaaagtgtaagaaaatgaggtgtcaagatatttttcaaatacccataattgcacactgatgatatattgtaattactatgtatgttaagagcattatacacaaataattcagatatgcattatattgtaatatagataccctttgttctataaatatatggcatctcttcttgtattttgctggatgtagagatttcaaagtttcaaaagagacaagaaaatttcccctctacacttgaaaaatatcgtaataacaattatcctaagatttcgataatgtggaaattttctttttaaataaggaacctgtaaaactatcataacacattcgtatttttacaaatattaattcatagatatagtatgccttgttattttaatgttataatggaatcaaactcttattattttttttttgaatttcaataacttctcatcattctttgttgcagttagagatccatatacagtattagacatccagtcataataatgtcagactaattcttaaaaaaagtagattttctgaatagtaaattgaaagattaacatgttaatactccaccatagtatattcttaaatgttgttcaatgttcaaagatcgagataaaatctctttttattacgttatttttcaaacattaaaataagatcatctgaataaaagacacaacaaaaattattgaacagggaaagtagtacagtagaatagaataaagatataatcaaaatattgttcattatatcaaatcaatttgtcttttatcattattaccataagcattgaaaatcaaccataaatcaaatccatgtgtaatagattggaattagtgaggataaatatcctgtaagatatgagtaaaaagatgatatagtaaatttgtttatggatatagcataattgtatttatgtttataacagttatcattatgtgttaatttcaaaagagtattgcatatgatcataaattattataacagtatcattcgatggataatgaagtgatatagaagatataattatatttttcatattgaaaatattagtaagggatggtgttcatgtgttattggagtatactttaatagttatattcataataaaagtggtagtgacacaaaaaatggtcatagtttgtcaataaatatcttccatagtcacagtctatgcatggagtaagtcgttatgaggttatttctgatagtcaaatataaatgattattagacatacagtggtgtaactatgtcatgtcaaataactgtttgataatattcaatattatatcatatgaatatgtaaagaaggcagataataactggctatttataagtgaagttggttacttatatacttggttgtcgatgagagtggttattattgtaattaattttttttttcgaactattttttcaaattttgaaacaaggaaaattgacaattgaaatttgaatgaaatgagtttggtggataatgaagaaatagtgatagctgatgctaagagtaattaagtgtgatatgtttgtgtggtatcgtccttgtctaagacataatatcaagagaagttgtatattaatgagaagttcatagtttaagagtgataccatacaatctaccagttattaatgtctaaatgaagtaagcagtttaagaataaaaacataattgaaagtaatagtggttgatatgaacttagtctactatgtataaatccatagtaaagatacatgctaatatcatgatgacagatactgtgaataacattgtatgttatagatgtaaaagagcaataaaatttactagatgatatcacgataataaacctagaaatgtaagtgtaaatataagatgcgacagagtgaccattgatgaatcagattaatccagtgtattaagtttacgttgtttacatcttttctacatcctacacatgaaaagaaaatggtctaaatttattgacttatttatcacgaaataaataactctatcgttgttatttttattctttcgaaaattgtggttcactcatattttgtaatttaaagaaagagaagtgatatatatgtttccgaaactttttagaaagagctcattgttttgcttaccttggtatagttggtggattaagtataaattgttcatataatcatttgacatgggaaataatttttgctctactcatgggaaaagatatattggacagtttttagagaattatgagaaatattctgtgcctaataatacaaaattattttccagaaaacaagatcgattcaaaaataatctacatgttctatatgcagtgaaagccacaaatttgaaaaatctgcttacgtttttcatttcaaagaagactttgataaatagatttatgttaaacactataccatctttctactgtttatgatcaagcatttatcctatgaaaatatttaaaatgatatttaatttaaataatcttaattgtttatggaaatatagttttgtagatttaacatttgggattagagtctcagggatgctaatatggtatctcctgaactatagtagacttaaagtctaacgttgttatgttttaagtatttagtaaattggatttctcgtttattgaaaacccatgcaaatagtatatattgtatttattattaaatacatattgatctttcacaactttacttctttcaaaaaaattaccaacgatctaccaaaatcagtttttaacaaaaaagatcttgtgaacatacgatatattgtctaattatattatattggactcaactatatcataatccaatgttgataattatccctacaatctatcaaactggatcaaagacctctttaagtgagctttgatataaaatttcctacgtggattatttgataatcgactacaaaaactcacacattctaatttgtattattgacaacatcatttctcttatctcatcatgtttcagaacatcacacgcgaggattaaatagttacaacttaataaataagtactcataatgaacctttagagcctagcataatttttccatatttgtaagttagacaatcaacaaatattattattgttgtttatttattaaaacaggtctcttagcactgtggtttgaaatataaataaagatcacttctctggagaacttgtaacaactctttatttatatataattacaactgtagatatttataagtttttgtaatgttttgggtcgatcttctcatcacaagattgtatattaaggtattcatgaaatcggatatcttgcttcaatactatttacaaaacgtgaggaattaatactagctaaatagatataaacagaatataaacaacaccctaatacttttgattctcaaaaaacttgtgttttaacaacaatacagccaaaacagcataaattaacatattcaagacctcaagaactataaatatacgaaggattgatatgacatttcccaaactttcatgatgattaaaccaaatgcaagaatattattaagaaagtattgtcaaaaaaacataaaagaaaaatcaaatattccccatcataccactttaaaagtgttcttcaaaacaattcaaaaactggataaatacagcagaaatataatcatagattcataaaaacgaataggttctttctgttttgtcttatccttgtagaaaaaaaaagattgataaaataattatctaatggttgctgttttgtttattgatgtttaatacaagattttacaaaatatattatcgattgttacgcgtctgcaaatactttcatgtaatagaacttatcctaatgttaacgtaataattttattgttaataagatccatagggatataagtaatttataagatgatgtattgtcgtgatagtgaaatacattcacagatatctttatacattcatgttggggatgatatcagaaagtaattcttactatagaataaggccagcaacaacaagttaaaaactatatctgagtataaataagagtgtttgtataaccaatacagaaattatatcaattacagaaaatgaattctttgacaattacccatatacaattcatatttttattctcaagagtactatggtatagttcatttgaaaaagttatgacaactactgttctagaaaattaactgtcagaatgcaatgatctttccaaactcaaaaataagagagaaggaaatactttcagaaatagttttgtggattgtgatttctttgaataatagtaatagtcatagcatatgaataatcattctgtaaattcatagttgcctctcccacacctcacattaacaatatatattttattatagtatattaaagttgttaagaattggtgctcatagtcattggataaatagtgaacgttctcaatactgtaattggataaatatatattacaaaattgtattaaagttcttccatcttcttctgtatgtataacacagaaatgataatatgtgaaaagtatgcgggaaaagaaacacgatttgaaaaaatgttgtctttgtgtatgttaaattttgttacttctcttctatgaatggcaaaaatcaagcaagcagtattattaacattttgtgacatgtaagcaacagttcctcagcattccagtggtgtcatatgttggaatctcattgttccatttgtttcattctcaaatattctatttcgacgacataataaaagtaacagtataacacagaaattgttaacattcaacaacaaataatggagttataaaaccacaataatttaactgaacattaataaataatccatatatactaacataatgaaagtttaataaactagcatagcaaagaacactttaaacagacttctatccagagaacttgaaatgctaatgtacttcatttaatagttgaactatgataatatctaagaaggtatattgatattttaaaaacacaacatatattatcacactatgaatatataccaattcatgttagaaataaaatataccactgcatattgaaatctggttttctatctaatgaaagttccaacatcactatttagagataattactacaaatactcttttcttcttttcttctcttaatctacttttcatctcatcgttgatggaaaaactgctgcagcaaaaaaattctgtgatgacatcgagaaaaaatatttaaaaattttaaaaaatacaaagcacgtaactgtgttttga

SEQ ID NO: 6 - DNA, 811 bp, Kazachstania heterogenica
  source 1..811: mol_type = genomic DNA
acacccatacacccatacacccatacacccatacacccatacacccatacacccatacacccatacacccatacacccatacacccatacacccatacacccatacacccatacacccatacacccatacacccatacacccatacacccatacacccatacacccatacacccatacacccatacacccatacacccatacacccatacacccatacacccatacacccatacacccatacacccatacacccatacacccatacacccatacacccatacacccatacacccatacacccatacacccatacacccatacacccatacacccatacacccatacacccatacacccatacacccatacacccatacacccatacacccatacacccatacacccatacacccatacacccatacacccatacacccatacacccatacacccatacacccatacacccatacacccatacacccatacacccatacactatattatatcaacaccacactcccttactcccacctttagtatctgtcttcactatactttcctctatttatatcctctacaatcttaattcaaaacaaaattcttttttgaaaaataaaaatatcaaccatcactttatatccatctataaacttatcaacttatctatattatatctatacctttttaataatccacacttccaatttactaataactcaactcatcactctattaaatacaaataccactactttccaacactctcattatctaactcttttactactcatctttttttactctcta

SEQ ID NO: 7 - DNA, 4941 bp, Kazachstania heterogenica
  source 1..4941: mol_type = genomic DNA
tgttatagtttggacttaggaccaatttttttaacagtactattgaacgaatagtaagggcaataacaaatatataagaacgttatatatatctaggagaattaaacgattattgcttgttcttttttgtattatacaatgtgctacatatttttataaatcaaccaaacatataaatttagataccaagatactggtcctttatatatgaactatgggttgatagtttcttatttgaggttctgtaacgactgtcaccgtagatacatttctccttaattagctatttaatgtttcatgaatgtttcattttgttacatagtattcaacaatcatgtgggatttatcaacaaaccctaagtcctataattccaaactagaacttttcttgacaatcatcacaaaaccctaacaatatttttcaaccctaatcgttttttacaatcataatatcaaggttgatctacaacaccttcctctcccaaaggttctgataaatttctgaagtttgatagcagtgaattgcgacgatcagtcggaagtttgttaaattcatctaaggtgtactcacatatcaactctggattaacatcttgcatcttgcagtagtaggtttgtgactcaatgtcataaccagtcacagcgatgatctctgaaagtctcattattctttctgtggcggtagctggtaaatccttaggataacgtcttttgtcattcacaaaccttttgatattttttacgttaatcaccctattctttttaaatgaagaaggcaaatcgacttcgactgtattattatcaaaaaccttcacaattctaaacggtcctatgaaaataggttggacttttaaataccttcctcccctaaaatagatgtctctatctaataagacgtattcgccgaccttaaaagtaagagagcttctatgaggattttcctgagtttccatcatttcttgccgttcttgtaggtaatcacgggtacgtaaagtaatggcttgaagtttttttgttagagtaactgcactatcatttctggctgaagagtcattaccaacatccataagaggttcattcggaataaaaccaatatcaatttcaaaaggggcagcaccaatagcagattgaggagttgaattgtagacgaattcgaggtgtggtaagaaaaaatcccatacagtgtgatcattgtgacaaaaggtacgtaataatctattgagtgttttattaacactttctgtttgaccatctgtttgggggtgattcgtggtggatttaagtagcttgatgtgtaaccggtcagtgagttccttataataaccacttgcgaacctaatatctctatcagatacaatcgttttgggaaaaccatggtaacagaagacatagcgaaaaagagcacggacaacaccggtagaaccataacatttttgcatagcgataaaatgtgcacgtttggagaatctatcgacaacaaccataatcatatcattaccttgtttagatgttggaatacctgtaacaaagtcaattgaaatatcaatccaacggcctgatggaacatctaaagggcgtaacttaccgttaatttttggacgataccgtttcattagttggcattgtaaacatccttgaacaaaactcttaatttctttcgacatggaaggccagtagtagtgtggagcaagtttattaatagtagtggtttcaccgaaatgaccaccttgtaaaaaactatcatgatataactgtagcagtgtaaatcgttctttggatggaacacaaattcgagaatcatagtatagaatgttactatcaaatttatagcgttcttgagctttggccgaaaacttcatgcgtttaagatatttcttataaagtgaatcatcagaggctgaaatattgaccttatcaacaacgcctagggaaactaaaatggcagcagaccatggatcttcgagtaatgattcataccaatcttgtggattaatcgaggacaacgtggttagtggataaacattaatagcagaatcgtcttgagggcgacttaaagcatcggcaacagcattgttttttcctttaatatgttcaatatcaaaatcgaattcttctaagtactgtagccatctagatagacgctgagaaggttcctttttgcttcggtaggatagtagagagctgtgatcggtccgcagtaagaatcgatgtccatgtaaatagtatctgaagtattttaatgactcaactatagctaataattcaagttcaccaatatgataacgactttgagtatcggaaatagttttcgaaaaataaccaatgacacctaataatttaccgttagctgataaacgttctagaactccacctatagcagcataacttgcgtctgtggtaagcctgtaattatcacctgggacaaacggaacgagaacaggagctgaggtgagacaagctttcaatttgatcgtggtatcttcttgagctttcgaccacggacatttcttagaaataaaatcgaaaagaggtttggccagcttactgcaatgtggaataaattttcgataataattgatcattcccataaatgattgagcactcttaatagtagtaggcataggaagttcttggatagccttaactttgtcttgttgaacagcaaaaccagcagtggataatgtatgacctaaaaattgtacctcagattgggaaaaataacatttgtttttcttgcagactaaaccctcttgccgtaatcttgttaaaacttgtctaagatcgtggatatgactttcataatctttactagcaattaaaatatcatccaagtaaacgaaaacatgtggaatatcaccaagtatgcgttgcatgtatctagcaaatgttgctggggcgttacataaaccaaatggcataaccttgtaatgataatgaccgaagggagtagtaaacccagttagttcttcagagtctgccgctagtggaatctgatgatagcctgaatgtagatcaagtgtagagaatatggaacagtcacctatttttgtcattaaatcatcaattcgtggtaatggataggggtctttaatggtaagatcatttaattgtctaaaatctacaaccagtctataggaaccatcttttttctttactaataatactggtgatgagactggacttttactctcgacaatgaaccctttatcaagtaattcttgaattatttttttgcattctttttctagtaccggggtcatgcgatagggtggtaatcgaggaggacgactattaggctttaattcgatcgtatggttataagtatgagtacctgactgtggcggtaattcattggtaacagtgtctttaaattcttgctgaagttctataggaagttcatggtgatgggggttgattggattttcattcttggataattgtaccaaaaaatttcttctacgtctgtgtcaaaaatttgatctatagcacctatggtaatgtcagttgtagtattgaaattagtgatattattagttgtagaaagtagttctggataatgttcgatgataggattgccaacaatgacttgattgtgtaattctggagtgacgtaagcgttgaattcgtatgatgtcttattgtctaaaagtttacattgaacggccttggtagtagtagaggttcgatctgcgatagcacctttccatatgaatggtgggacagtgtacggtttccatccgtttttggcaactaaatcttcactaaccagtgaagtaggacttcctgtatcaaacagtacagggacctttattttgttaacgatacatggacgttcgtgtcgagtacctactaatggcttggtggtggttataatagtagtgacttctggtattgtagtagtatcgatgtattttgtttttgtatactcgtctgggtgttttaattgggtgtgtgacccagcacttttctcgaaaaaaaatttattttttcttgatttatttgtgtcttgggagtttgataaagaggataaagaagaaggaaagaaatgggaatgagaagtaacggtatttttagcgagaactcgcatgtgggcaagtgctggattgatgtcctggtttgcgacatttgaagcatagtttatattccaagcacaaacgacgaaggtcctctttatcacgtttattggaagaagtggtatcagctgagttctgggatcttcctctcctgaaagatgtaatgttagtagaatgcgtagaataacctctacggtaacggttgttagaatgaatagccataatagtatcaccgtcactatctaattggtaggaaccagaattaggtgagacgtcacctgagtaattaatcgtaattggatctagtaagcagtgctcacatttgcgagcaagttcagtggctttatgaaatgttgtcggagactgtaagacgacagcctttctagtgtcgggttttaacccttgaataaaataacttatgagtatctgttcgctcatggcaccctcgggtaacaggtttttgtactggtaaaactctttgatgtatccgtcgatgttattatgttgttttaatgaacaaattttacgactgatgtcgtacacatctagttgtgcaccaaaggaggcagtgaattgagagaccagggtggagtaggaaatggaatgtagatcatgatcagcagagaagttaaggaaccattgtgtagctttacctccaatattgtcagcaaagatgcaaattttacggaagtcatcagtaatatgatgaagaccaaattttaaatctaaggataacaaaaattcacgtaagttaaagactgagcgagttgaacctgtgaaaggttgagcgacctttatggcttggacgaggacaggattggttgggaattcggacatgatggacagatattttggcgacgctaccagt

SEQ ID NO: 8 - DNA, 2007 bp, Kazachstania heterogenica
  source 1..2007: mol_type = genomic DNA
taccctgtaccattctgctctttttctctcactgtcccatcataatatgaatattatcattctctgtcatcacattatctatatttccatacatctcctcatctactctactacttctctaccctcaaccctactcttctactctcacacatcttcttttctttcaatatattgtactatttccctttctctaccattgtcatatttattgcccacttgttgagatattaccccacactcaatcaaaattatgtgaaaagtataaacagtcaagatatagaaattaggaatactttcttttactcacaactttatatacctaatacacggtttgtgtataatatatgtattatttaatactgtgagcgatcactcataaagttaccctttgtaatgttccgttataacctataggctcttactccacaccttttaaacttcaacactatcatgcatttttcttgtcttaccacttccttacttccaactcttgtgaactagtgttcataaatctcataatctaatggtagactaagacagagagatgagctagcactcaatctaatcaaatactacctaatagatatgtgtcaataatgaataatataagtacactctattgatgtactaatggttatttatttattacttatttttatattattatataattgcatctaatctataacacaaactttcaccgttggaaccctctctgacgccttttctctcttcaattaattaaacctattattatacccctggtctctacatctataaactacaacaacttcttctgcttgtatccaacatatacatatatccataccctatctacaaccacacaaacacatcatctaacctctccaccactcactgccacacaccttcactatactttacagcatcaagtatatctccaatctcaacatgacaagataaacaaaataaacaaataaacaacaatgtgcagtgccactaatatcccactacaaatacctcacaacttacaatactaccaatatcctattgtgagttatatcttcttatcatactattctagaacgaacactaattatttttttaattctgatgtcttgcgtcgacataataaaacagtcttaattaagaaacctaatagacatattgtctatgttctgacagttttactacccatcaacattttttactcactcatattcctattttttctatctcttcttctttcaccctaatcctactctctccaaaactaaaacatcactaacttatcttctactactcaccaccactctctcctactctcccctccccttttatacattttatacccacactcccattttcaccaccactaatctcctcctttcctaacaattctataattttgtcacccaccccacctcacatactacttcttcccattgattattttctagtattatccactcccactcaacttatacaattatcaaagatttctctttacccatactcttctctccactctctccattattcaatacactctccaattcctctaaattttttacctctcaaccttcccttttaccttataccttatcattccacacctttcaatctgcaactgcctatctgcctttttgcaacatacatactatttctatcacccctcttcactacactcttttgttatgtcctcaatatccataattaatgcaaaaaaatatttttcaacaacatttttgaaagcacaaataaaaatatcaaccatcaaattctgtttatgtataaacatgttaacttatctgtattatttctatacctttctaataatccacacctccaatttacatctctctatttaacacaaacaccactactctccaccactctcaccttctccccattacctgtccccaaactcttattcctttttctatttcattccacatctctttatcttatccttttcttcccactctttcatctgtttatttcttactttccctcttatatcactta

SEQ ID NO: 9 - DNA, 1953 bp, Kazachstania heterogenica
  source 1..1953: mol_type = genomic DNA
tagccaaactgacaagatcttttacatattatatccattgttgaagaataatactaatagtttgaagtttttgtgtaatttaaaaaaattctttttcttgggacatttttatacgaatatactgtcataaaaagacaacattttaatcttcacccaggtattttttgaattttcaaaaaaaaaaaaaaaagaaaaagaaaaagaaaaggggccactaatcggtatctcctttttaatatcaaaaatgcagtatatatatatatatatatggaacaatatacaaataggtatatatttctcttattttcccctcttttctcttcttaaaaactcctattcttgatgctggattgatatattaccgatttgagtaacatgtaaatatatcaaagaggaaaaatgtttgttttgcacattcaacgttatggagataagatcaaacaaaatcaaaataaattaatatattatgaaaaattgccaaaaggtaaacatatataagtagacaactttacttattaattttccaatctggatgaataatatatatacattatattgtacggttcttgtatatttatataattattaattcccaatcaagagattgagggaaaattacactacatatcaatataataataatacacaataataacatattgtatgatcaccgacgctaagaacatgtatactaatattattcagccagaggacttgaaaatattatttttttttctaaatttctagaccatgtatctaaatattacagatattatttcttccatatcgaatcattaaatctaaaaaaaaaaatcattcaagagattataagtatgatagtatttctagagggaaaaaacataaaaaggagacaagaaaatatatataataaagtattgtatgaaaattgtatttatttatataataaaaataaagataaaaataaattggttgctataatttatttgtgtctagtatcatcatatatcctaacaacctaaaattccatttgatatttacctgatagaaaattatatcttatttaatcacgaccaacatagtttacctatcattttattttctctcaactagctaaattctacacaaactcagaccttgaaaagaaatatttggccgcataataaaaaattatgtttaatttcaatttttttttttcctgtacaaaaatcatttgaatattcacataattatacattacaataagaatacaataaactgttttatatcaccattactaataaaacaatcttataattgttttatctgttgagtcaactattgttatcaatgtatacaatgtataatcaagatcttgtattaactcttgatatcaaaacttttaatagcttattttaatacaagttcgtgctgtggaatagagtaggaaaaaacgctcaatttgggaaaggtattcaccttaattataaaaatactatctaatataatatttgaaatatttgatataaaaaggtaatatatataatgatatcttatttcttgatgtatgtaaccatatatattaacataataattttacccctgttatattatcttatgttcttcttgtttcttttcctttttatctatatgattcgattgttttattgtgactccagttatattttcctatgataaataataatgactatttatcatagcatacggtattgattaccgttagtcacgtgaaacttctagtgtcacaataaatctcttattcataattagattatttcactgtataagatgttgtaatatgatgtggtcagagttttgtattattcggggaagcgctagaaatatcaaacagataatctattaataatcgagacaataattaatacaatcggtaatgcaattattaatacggtcttatatattaacagctatatcgagcttatataattatactatttgcttattgtattctgc

SEQ ID NO: 10 - DNA, 746900 bp, Kazachstania heterogenica
  source 1..746900: mol_type = genomic DNA
cactggcagtcgactgaaccaccatgtgtcttgagaggaagagagtaccaccagcagatcttgggatatgcccaaggcctcccccttggaacacaccattgccaggcataaaccacatatccaacacacgttatataggagagaatctgtgtgagtctcctacagagggaaatatacttggtaaaactgcacagtacacccctatagagggggacacactaagtgcaattgcgtagtacatctctaccaaagggaaacacacttagtaaaagcacatatagcacatccccgcagtagacaaacatactcggtaaaaccacacagcacacctccacagcagaaaaccacaccacaaaaaactccctctaagtctgggtcgacctctgtccaccccaaagaattagaaagaaaacaaatcagacaacagaggcttaatctcagcagatcgtaacaacaaggctactccactgcttacaataccccgttgtacatctaagtcgtatacaaatgatttatcctcacgcaaaatgacattgcaatccgccggcaagcacccaaggcctttccgccaagggcaccgtcgccagcctgctatggttcagcgacgccacaaggacgccttattcgtatccatctattgttgtgcgaggcaaaagaaatcaccgcgttctagcatggattctgacttagaggcgttcagccataatccaacggatggtagcttcgcggcaatgcctgatcagacagccgcaaaaaccaattatccgaatgaactgttcctctcgtactaggttcaattactattgcggtaacattcatcagtagggtaaaactaacctgtctcacgacggtctaaacccagctcacgttccctattagtgggtgaacaatccaacgcttaccgaattctgcttcggtatgataggaagagccgacatcgaagaatcaaaaagcaatgtcgctatgaacgcttgactgccacaagccagttatccctgtggtaacttttctggcacctctagcctcaaattccgagggactaaaggatcgataggccacactttcatggtttgtattcacactgaaaatcaaaatcaagggggcttttacccttttgttctactggagatttctgttctccatgagccccccttaggacatctgcgttatcgtttaacagatgtgccgccccagccaaactccccacctgacaatgtcttcaacccggatcagcacctaacggcaccttcaagtccagaacgtggaaagtgaattccagctccgcttaattgaataagtaaagaaactataaaggtagtggtatttcactggcgccgaagctcccacttatgctacaccctctatgtctcttcacaatgtcaaactagagtcaagctcaacagggtcttctttccccgctgattctgccaagcccgttcccttggctgtggtttcgctagatagtagatagggacagtgggaatctcgttaatccattcatgcgcgtcactaattagatgacgaggcatttggctaccttaagagagtcatagttactcccgccgtttacccgcgcttggttgaatttcttcactttgacattcagagcactgggcagaaatcacattgcgtcaacatcactttctgaccatcgcaatgctatgttttaattagacagtcagattccccttgtccgtaccagttctaagttgatcgttaatcgcagcaagcgacggtccccgaggggtcctaccagggccgtctactgcagggcacgcaagcagtccgtctcccagagcaagccccggaaaacagtccacaagcacgcccccagcgtctgaccaaggccctcgctgcccgacccttagagccaatccttatcccgaagttacggatctattttgccgacttcccttatctacattattctatcaactagaggctgttcaccttggagacctgctgcggttatcagtacgacctggcatgaaaactattccttcctgtggattttcaagggtcgtcacaagcgctccggagcacacaatgatgtctgcctcttccagccataagaccccatctccggataaaccaattccagggtgataagctgttaagaagaaaagataactcctcccagggctcgtgccggcgtctccacattcagttacgttgccgtgaagaatccatatccaggttccggaatcttaaccggattccctttcgatagtggcctgcaaaatcaggcgcgttgaaacggagtttccctatctcttaggatcgactaacccacgtccaactgctgttgacgtggaacctttccccacttcagtcttcaaagttctcatttgaatatttgctactaccaccaagatctgcactagaggccgttcgacccgggctcacgccctaggcttcgtcactgacctccacgcctgcctactcgtcagggcgtaatctctaccctgacggtggagtataggtagcacgcttgagcgctatccattttcagggctagttcattcggccggtgagttgttacacactccttagcggattccgacttccatggccaccgtccggctgtctagatgaactaacaccttttgtggtgtctgatgagcgtgcattccagcaccttaactccacgttcggttcatcccgcatcgccagttctgcttaccaaaaatggcccactaaaagctcttcattcaaatgtccacgttcactcaagtaacaaggacttcttacatatttaaagtttgagaataggtcaaggacatttcgtccccggaacctctaatcattcgctttacctcataaaactgatacgagcttctgctatcctgagggaaacttcggcaggaaccagctactagatggttcgattagtctttcgcccctatacccaaattcgacgatcgatttgcacgtcagaaccgctacgagcctccaccagagtttcctctggcttcaccctattcaggcatagttcaccatctttcgggtcccaacagctatgctcttactcaaatccatccgaaaacatcaggatcggtcgattgtgcacccccgagggggccccaacctacgttcactttcattccgcgtacgggttttacacccaaacactcgcatagacgttagactccttggtccgtgtttcaagacgggcggcatataaccattatgccagcatccttgacaaaagtcgcgttcctcagtcccagctggctgtattcccgtaggctataacacttcccgagggaagccacattcctccggctttgtccagccgccaaaactgatgctggcccagtgagctgcgagagtcccccacccacaaggagcagggggcgcaaaacaccatgtctgatcaaatgcccttccctttcaacaatttcacgtactttttcactctcttttcaaagttcttttcatctttccatcactgtacttgttcgctatcggtctctcgccagtatttagctttagatggaatttaccacccacttagagctgcattcccaaacaactcgactcttcgagcagcccttacacggaaccgcacccctcgccacacggggttctcaccctccatgacgtcctgttccaaggaacataggcaaggaacggccccaaggatccactctacaaattacaactcgagcaccgaaggcgctagatttcaaatttgagctcttgccgcttcactcgccgctactaaggcaatcccggttggtttcttttcctccgcttattgatatgcttaagttcagcgggtactcctacctgatctgaggtcaaacttaaaagaacactgttcgccactgctgtcttctcgcagccgtcaacgggcttaacccccgccagctgtccccgaattggcagaacctagtacgaagacgtccagcagagacccacggccactgcagccaccggccagcattttcaagctaactcttccgagtatcactcacaaccaaacatcgctgtttgagaaggaaatgacgctcaaacaggcatgccccctggaataccaaggggcgcaatgtgcgttcaaagattcgatgattcacggaattctgcaattcacactacgtatcgcatttcgctgcgttcttcatcgatgcgagaaccaagagatccgttgttgaaagttttgaagatttgtacatcactcgtcctgccacagcactcgcgcactgccccagaactcgtgtttttttgctgactattttctacactgcatttttgtttgtgttttgtgtgctgcactctgggccgttgccagcccaaagcaccatgtgcacccagaaaaacgtgcatacgtgtctccactgtgtgtgtgttctacatgcagagcaccttagcagaaggctcccggcagagcacccacaggcaccgcgcaactaagcgctggttagcccgcagtatacgcactcccccatggctcctcccagcaccctccacgagacagttttgtttctctaatgatccttccgcaggttcacctacggaaaccttgttacgacttttagttcctctaaatgaccaagtttgaccagattctccgctctgagatggagtcgcccccttctctaagcagatcctgaggcctcactaagccattcaatcggtactagcgacgggcggtgtgtacaaagggcagggacgtaatcaacgcaagctgatgacttgcgcttactaggaattcctcgttgaagagcaacaattacaatgctctatccccagcacgacggagtttcacaagattaccaggacctctcggcctaggttagactcgctggctccgtcagtgtagcgcgcgtgcggcccagaacgtctaagggcatcacagacctgttattgcctcaaacttccatcggcttgaaaccgatagtccctctaagaagtggacactccagcaaatgctagcaccactatttagtaggttaaggtctcgttcgttatcgcaattaagcagacaaatcactccaccaactaagaacggccatgcaccaccacccacaaaatcaagaaagagctctcaatctgtcaatccttattgtgtctggacctggtgagtttccccgtgttgagtcaaattaagccgcaggctccactcctggtggtgcccttccgtcaattcctttaagtttcagccttgcgaccatactccccccagaacccaaagactttgatttctcgtaaggtgccgagtgggtcactaaaaaaacaccacccgatccctagtcggcatagtttatggttaagactacgacggtatctgatcatcttcgatcccctaactttcgttcttgattaatgaaaacgtccttggcaaatgctttcgcagtagttagtcttcaataaatccaagaatttcacctctgacaattgaatactgatgcccccgaccgtccctattaatcattacgatggtcctagaaaccaacaaaatagaaccaaacgtcctattccattattccatgctaatatattcgagcaatacgcctgctttgaacactctaattttttcaaagtaaaagtcctggttcgctgcgcacccacaaggagcacacagttagccagaaggaaaggcccggttgcatcccagtacgtggaaaaatccagaccggtcaaccaggcccaaagttcaactacgagctttttaactgcaacaactttaatatacgctattggagctggaattaccgcggctgctggcaccagacttgccctccaattgttcctcgttaaggtgtttacattgtactcattccaattacaagacccaaaagggccctgtatcgttatttattgtcactacctccctgtgtcaggattgggtaatttgcgcgcctgctgccttccttggatgtggtagccgtttctcaggctccctctccggaatcgaacccttattccccgttacccgttgaaaccatggtaggccactatcctaccatcgaaagttgatagggcagaaatttgaatgaaccatcgccggcacgaggccatgcgattcgaaaagttattatgaatcatcaaagagcccgaaggcattgattttttatctaataaatacatctcttccaaaaggtcgagattttaagcatgtattagctctagaattaccacagttataccacgtagtaaaggaactatcaaataaacgataactgatttaatgagccattcgcagtttcactgtataaattgcttatacttagacatgcatggcttaatctttgagacaagcatatgactactggcaggatcaaccagataactatctttcgttgctgcagagccgccgcagtctgccccgccctccaggagaaccctggcacgcacgcagcccccggcttccctccagcctcgcagataaccaactgaatcgaacactaaagttcgcagtaaccggcgagcatcgctgctctcctccggctgcagagcaccgtacgcgcacgcagttcgacccacgcacgcagctgcaccctcaccgaacttggattacataacaaaccaattccagatagcactctttgagttcccccgagcgcagtccgcaaaactgtgtcgccccgatcttgcacgcagcaacacgtttcgcatcagcaccctgagaggaggttgccccaggaaatcacagtcttgcgaccggctatctccccaagcattcccccaattgccgaattctttgaaacagattgctagaagctagtaatccaccaaatccttcgctgctcacctgccggaatcacaagacgcccgcgatgagactcttcgggttcctgtctgcagcacacttgtctcctcaaaccgaaagcctcggtccaccccagcatcggcaaaaaccgcttcccgcactcgccactcacgcatcccgccccaaaccccctcgtcccagctcctttcgccgcccaatctcgcacacgcacacctcagtcgcgccccttccctgacgccagctctgcacaacacaccatcagaaaactacgcattgctgcttcgtcctcctcaggcttgccacacatcccctttgccaggttcagatcgcttcctcagcacacacgcacaagaccagactgctccattcgccagaactcaaggccccagaacaaaacacactcgcagtccgcacaagtcgccgtctcttcctcagccagagcgtctcgcagctctccattctcagaaacgcacgcaccccagactctcacccatgccaacacacgctgcagggaactgagcagacctcacgatcacccagagacccccgccaccgcttggccaggccatgtaagaaatagacaaccagcacttggccagtcgtccacagttctacaaccgacacgccgtactcgagcctgtttccaaacccttttcgacttgtcttcaactgctttcgcatgaagtacctcccggcacattttccctgcaaatctatcgctgctgcgttttgtccccacattaccgtgtacccgcggtctgccccctcactccctcccctttatagtggcgcctgtcacgtgaatatactgtaacaggcatttaggggcgtctcccctaaaatacacttttttgtcctttttatgttttctatgttttgtgctttgtacccactctacgtgctggcgccaggtcttttctttactgctgcagctccctgccctttttttgtttttctcacctcccgccttcgctgtctggtagctgccgtggtgggaaaaactcgaaaattaaaatcttcgatgcccctgccgggattcgaatcgccgccgcctccgaaaaaggaaaccgccgtgcagcacgacacaggtatcctgcacgtgatagtcacgtggaagtcacgtgaagggcaaaacggcctcctggcacccccactaggtggcatgcaggggtattcggaccccctcattgtggatctgcacatatcattccctgtttcccaggtatttcccccaatatgccggggaaagaggtgcattttggtatgtttttggtgtgtatttgctgcttagtacaggtaaactgctgctgctatggtgtagagatatacttttggaaatgtagtttgtctgtgaagagtggttttgtggagattcccacgttgttctagcgctgtccccaaatgtttttagaaaaacatctattttgcattatttttgtatggcagcacccctacatatgcacactttttagtgtcctatagtaatctcctgcccatatttcactgtattgcaccttacatcctcgagttccctcccccccccccctcagtttcttccacttggccccctcagcagcctatatccacagtctaaaaaagagacaatccttagcatatctcccactttcatagtgactaccccctaatattatgtgacattccagtatattccactctgtactaccccctttgccctcttttttggtctctccaaccccctcccccatataatcctcacaacctctttccattcgacccccctgcaaaatccgctattttcccagattttattatggtggccactctcatcctgacccaaacaactctcttatatatttttcccaccacaaaattactatatccctccagttttggcctgtagctgctggctttcccccgtatcttcccaagtttcctgcacctggcctcacagcaactttagcataaaacttgagcatgccccatactatgcagtccacctgcccagaacacctgacctatatgattctgcagtcccgattcacctgtaatccacctgatctccctgtcttttgcccattcaccatacaacatttcccaaaaacctctattttgtggcactcgtccccgacccttggcccccctcataatcgaccctccacatgcctctaccgcctcaactactgaacataccataataaaccaccctttttactcctatatccaccctgttctggtcggtaacgccccttcttccaccactttccccagtttccaccactctccctggggggccacttcccaccttcttccgcctctagcttccaactttactatggccacccccagatgtgagaccaccttccccaccaaacaggagatgtagaatacgctggtcacatcctcttcccatatacccctttctgtgacatacgttctattgtctttttggctccaaaactctgaatctcggactttttctatggtcaccccccaatgtaagaccatcttccccactaaactaagcatcctctttctagctgtcgccactaaaacgtcctagctccctgtttcccccaacttccaaccacgttttcccactcacacccagaatcgccgcttttggcccacttccccatgtttccacacatcactttcccaccaaaaacattttttgcactaaccctactctccgtttcatattttgtttattttgcagcacatatctccatccacattcatatttactaaagttaactttttttcactaaatgtcaattccatgaacactccttcgccaccccccattttgagacccttccctcagggtttccccaggtctaagtcttctgttcgattcctcgtcgtcactttgtggggggtcacctgcgaaagttttgtcgtagcggctcccgttctcaagatagccacacttactatggggccatgtttccaagcacagcagtcatatagagggtcattctgttaaaatgtcggttgcggccatatctaccagaaagcaccgtttcccgtccgatcaactgtagttaagctggtaagagcctgaccgagtagtgtagtgggtgaccatacgcgaaactcaggtgctgcaatcttttttatttttttgacccccacacttctatatatttttggaatccttggagtctcctgatcacaatggtgtatgtcccacagtcgggagacggctggttgcagagatacggacccaaatgtcactccacacgacggtttcctattgtgttcgccaaatccgcggacatagtggaagaacaatagtaccattgtattcttcgtcccttgttgccccgaacccacactttccgccttcacagtacacagtgttttttccaaactgtgtcttccgccgccgtttccgcggaaccctaccctattgttttctctttatttttccagcaacaaatcgtttcttttttttccgtcgtcgacgaaaaaatttttcaagaaaagcacttcagtagaagtgaaaaaaaatatatataaggcgcgcgtttttccctttttttcccaaactttttcccactccacgttcgtcctcctaggcaagtttagctgggatttttcgagactggcctatattatagtatgttcctggtgtgttttgggtttttgaggtcggatttttgaaggctttttgtgttatagtgtgttttctgtgtgtatttggcggttttgtcctgaaatcctccttatttggaggtgtatacaggtttttgtggcggaatttactttcaccactacatttttgtcggattctcttcggtttacccttcggattctctttcaccactacatttttgtcggattctcttcggtttacccttcggattctctttcaccactacatttttgtcggattctcttcggtttacccttcggattctctttcaccactacatttttgtcggattctcttcggtttacccttcggattctctttcaccactacatttttgtcggattctcttcggtttacccttcggattctctttcaccactacatctctttcagattccttctttttgcatggcggttttcctatacactcactattccactacttctgcccatatcctcacccatcgctacttcttctttgcctgcccacccgtacttcgtggtaccaggcacccccttgtgtggccccccttctggccacacactcttgcactgtaggcccttggggtcggcagtggagggggggcaggcctcaaggcctggggctgtctaccctagggacccctcccatccctaggctggcatcccctcgccttggcctgccctataacccctccatttgccacctttaagggacttaatatcattaagcacgggagaataggagatattctatatttctgggggaaaactaccgccgcctgatattttccgtaggcacttgtgttccacggttttcgtgtgattgaggattatccctcttttcttgccattcctcagtagactgacagtactactaaagattccatgtatggtggcagcaacacaaaccctacactcttgctggggaatgcctggcgaaccacagggcagccctaactggcagccggctggaccgtgcctgtagatgtggcacttccacaagccctactgttgtgcagtgtctctctgccagaaaacaggtgctgcatctgggcagccctatgcagcacacttcactgcagtgcccttttacacagaccatctgttaagtatgctgtgagtgtagtggcatgttgagtgcagccctaagcttccagagggaaatgcttggggacacacactttaaccctaacaacggccacctacccaccatccatgtgtgttcccagtcccacaaaccctactatcctgctgcaaccctgcactttcagtggaaaatacgtggcacaatacatacactccaaccccgacactggcagtcgactgaaccaccatgtgtcttgagaggaagagagtaccaccagcagatcttgggatatgcccaaggcctcccccttggaacacaccattgccaggcataaaccacatatccaacacacgttatataggagagaatctgtgtgagtctcctacagagggaaatatacttggtaaaactgcacagtacacccctatagagggggacacactaagtgcaattgcgtagtacatctctaccaaagggaaacacacttagtaaaagcacatatagcacatccccgcagtagacaaacatactcggtaaaaccacacagcacacctccacagcagaaaaccacaccacaaaaaactccctctaagtctgggtcgacctctgtccaccccaaagaattagaaagaaaacaaatcagacaacagaggcttaatctcagcagatcgtaacaacaaggctactccactgcttacaataccccgttgtacatctaagtcgtatacaaatgatttatcctcacgcaaaatgacattgcaatccgccggcaagcacccaaggcctttccgccaagggcaccgtcgccagcctgctatggttcagcgacgccacaaggacgccttattcgtatccatctattgttgtgcgaggcaaaagaaatcaccgcgttctagcatggattctgacttagaggcgttcagccataatccaacggatggtagcttcgcggcaatgcctgatcagacagccgcaaaaaccaattatccgaatgaactgttcctctcgtactaggttcaattactattgcggtaacattcatcagtagggtaaaactaacctgtctcacgacggtctaaacccagctcacgttccctattagtgggtgaacaatccaacgcttaccgaattctgcttcggtatgataggaagagccgacatcgaagaatcaaaaagcaatgtcgctatgaacgcttgactgccacaagccagttatccctgtggtaacttttctggcacctctagcctcaaattccgagggactaaaggatcgataggccacactttcatggtttgtattcacactgaaaatcaaaatcaagggggcttttacccttttgttctactggagatttctgttctccatgagccccccttaggacatctgcgttatcgtttaacagatgtgccgccccagccaaactccccacctgacaatgtcttcaacccggatcagcacctaacggcaccttcaagtccagaacgtggaaagtgaattccagctccgcttaattgaataagtaaagaaactataaaggtagtggtatttcactggcgccgaagctcccacttatgctacaccctctatgtctcttcacaatgtcaaactagagtcaagctcaacagggtcttctttccccgctgattctgccaagcccgttcccttggctgtggtttcgctagatagtagatagggacagtgggaatctcgttaatccattcatgcgcgtcactaattagatgacgaggcatttggctaccttaagagagtcatagttactcccgccgtttacccgcgcttggttgaatttcttcactttgacattcagagcactgggcagaaatcacattgcgtcaacatcactttctgaccatcgcaatgctatgttttaattagacagtcagattccccttgtccgtaccagttctaagttgatcgttaatcgcagcaagcgacggtccccgaggggtcctaccagggccgtctactgcagggcacgcaagcagtccgtctcccagagcaagccccggaaaacagtccacaagcacgcccccagcgtctgaccaaggccctcgctgcccgacccttagagccaatccttatcccgaagttacggatctattttgccgacttcccttatctacattattctatcaactagaggctgttcaccttggagacctgctgcggttatcagtacgacctggcatgaaaactattccttcctgtggattttcaagggtcgtcacaagcgctccggagcacacaatgatgtctgcctcttccagccataagaccccatctccggataaaccaattccagggtgataagctgttaagaagaaaagataactcctcccagggctcgtgccggcgtctccacattcagttacgttgccgtgaagaatccatatccaggttccggaatcttaaccggattccctttcgatagtggcctgcaaaatcaggcgcgttgaagcggagtttcctatctcttaggatcgactaacccacgtccaactgctgttgacgtggaacctttccccacttcagtcttcaaagttctcatttgaatatttgctactaccaccaagatctgcactagaggccgttcgacccgggctcacgccctaggcttcgtcactgacctccacgcctgcctactcgtcagggcgtaatctctaccctgacggtggagtataggtagcacgcttgagcgctatccattttcagggctagttcattcggccggtgagttgttacacactccttagcggattccgacttccatggccaccgtccggctgtctagatgaactaacaccttttgtggtgtctgatgagcgtgcattccagcaccttaactccacgttcggttcatcccgcatcgccagttctgcttaccaaaaatggcccactaaaagctcttcattcaaatgtccacgttcactcaagtaacaaggacttcttacatatttaaagtttgagaataggtcaaggacatttcgtccccggaacctctaatcattcgctttacctcataaaactgatacgagcttctgctatcctgagggaaacttcggcaggaaccagctactagatggttcgattagtctttcgcccctatacccaaattcgacgatcgatttgcacgtcagaaccgctacgagcctccaccagagtttcctctggcttcaccctattcaggcatagttcaccatctttcgggtcccaacagctatgctcttactcaaatccatccgaaaacatcaggatcggtcgattgtgcacccccgagggggccccaacctacgttcactttcattccgcgtacgggttttacacccaaacactcgcatagacgttagactccttggtccgtgtttcaagacgggcggcatataaccattatgccagcatccttgacaaaagtcgcgttcctcagtcccagctggctgtattcccgtaggctataacacttcccgagggaagccacattcctccggctttgtccagccgccaaaactgatgctggcccagtgagctgcgagagtcccccacccacaaggagcagggggcgcaaaacaccatgtctgatcaaatgcccttccctttcaacaatttcacgtactttttcactctcttttcaaagttcttttcatctttccatcactgtacttgttcgctatcggtctcgtcgccagtatttagctttagatggaatttaccacccacttgagagctgcattcccaaacaactcgactcttcgagcagccccttacacggaaccgcacccctcgccacacggggttctcaccctccatgacgtcctgttccaaggaacataggcaaggaacggccccaaggatccactctacaaattacaactcgagcaccgaaggcgctagatttcaaatttgagctcttgccgcttcactcgccgctactaaggcaatcccggttggtttcttttcctccgcttattgatatgcttaagttcagcgggtactcctacctgatctgaggtcaaacttaaaagaacactgttcgccactgctgtcttctcgcagccgtcaacgggcttaacccccgccagctgtccccgaattggcagaacctagtacgaagacgtccagcagagacccacggccactgcagccaccggccagcattttcaagctaactcttccgagtatcactcacaaccaaacatcgctgtttgagaaggaaatgacgctcaaacaggcatgccccctggaataccaaggggcgcaatgtgcgttcaaagattcgatgattcacggaattctgcaattcacactacgtatcgcatttcgctgcgttcttcatcgatgcgagaaccaagagatccgttgttgaaagttttgaagatttgtacatcactcgtcctgccacagcactcgcgcactgccccagaactcgtgtttttttgctgactattttctacactgcatttttgtttgtgttttgtgtgctgcactctgggccgttgccagcccaaagcaccatgtgcacccagaaaaacgtgcatacgtgtctccactgtgtgtgtgttctacatgcagagcaccttagcagaaggctcccggcagagcacccacaggcaccgcgcaactaagcgctggttagcccgcagtatacgcactcccccatggctcctcccagcaccctccacgagacagttttgtttctctaatgatccttccgcaggttcacctacggaaaccttgttacgacttttagttcctctaaatgaccaagtttgaccagattctccgctctgagatggagtcgcccccttctctaagcagatcctgaggcctcactaagccattcaatcggtactagcgacgggcggtgtgtacaaagggcagggacgtaatcaacgcaagctgatgacttgcgcttactaggaattcctcgttgaagagcaacaattacaatgctctatccccagcacgacggagtttcacaagattaccaggacctctcggcctaggttagactcgctggctccgtcagtgtagcgcgcgtgcggcccagaacgtctaagggcatcacagacctgttattgcctcaaacttccatcggcttgaaaccgatagtccctctaagaagtggacactccagcaaatgctagcaccactatttagtaggttaaggtctcgttcgttatcgcaattaagcagacaaatcactccaccaactaagaacggccatgcaccaccacccacaaaatcaagaaagagctctcaatctgtcaatccttattgtgtctggacctggtgagtttccccgtgttgagtcaaattaagccgcaggctccactcctggtggtgcccttccgtcaattcctttaagtttcagccttgcgaccatactccccccagaacccaaagactttgatttctcgtaaggtgccgagtgggtcactaaaaaaacaccacccgatccctagtcggcatagtttatggttaagactacgacggtatctgatcatcttcgatcccctaactttcgttcttgattaatgaaaacgtccttggcaaatgctttcgcagtagttagtcttcaataaatccaagaatttcacctctgacaattgaatactgatgcccccgaccgtccctattaatcattacgatggtcctagaaaccaacaaaatagaaccaaacgtcctattccattattccatgctaatatattcgagcaatacgcctgctttgaacactctaattttttcaaagtaaaagtcctggttcgctgcgcacccacaaggagcacacagttagccagaaggaaaggcccggttgcatcccagtacgtggaaaaatccagaccggtcaaccaggcccaaagttcaactacgagctttttaactgcaacaactttaatatacgctattggagctggaattaccgcggctgctggcaccagacttgccctccaattgttcctcgttaaggtgtttacattgtactcattccaattacaagacccaaaagggccctgtatcgttatttattgtcactacctccctgtgtcaggattgggtaatttgcgcgcctgctgccttccttggatgtggtagccgtttctcaggctccctctccggaatcgaacccttattccccgttacccgttgaaaccatggtaggccactatcctaccatcgaaagttgatagggcagaaatttgaatgaaccatcgccggcacgaggccatgcgattcgaaaagttattatgaatcatcaaagagcccgaaggcattgattttttatctaataaatacatctcttccaaaaggtcgagattttaagcatgtattagctctagaattaccacagttataccacgtagtaaaggaactatcaaataaacgataactgatttaatgagccattcgcagtttcactgtataaattgcttatacttagacatgcatggcttaatctttgagacaagcatatgactactggcaggatcaaccagataactatctttcgttgctgcagagccgccgcagtctgccccgccctccaggagaaccctggcacgcacgcagcccccggcttccctccagcctcgcagataaccaactgaatcgaacactaaagttcgcagtaaccggcgagcatcgctgctctcctccggctgcagagcaccgtacgcgcacgcagttcgacccacgcacgcagctgcacccctcaccgaacttggattacataacaaaccaattccagatagcactctttgagttcccccgagcgcagtccgcaaaactgtgtcgccccgatcttgcacgcagcaacacgtttcgcatcagcaccctgagaggaggttgccccaggaaatcacagtcttgcgaccggctatctccccaagcattcccccaattgccgaattctttgaaacagattgctagaagctagtaatccaccaaatccttcgctgctcacctgccggaatcacaagacgcccgcgatgagactcttcgggttcctgtctgcagcacacttgtctcctcaaaccgaaagcctcggtccaccccagcatcggcaaaaaccgcttcccgcactcgccactcacgcatcccgccccaaaccccctcgtcccagctcctttcgccgcccaatctcgcacacgcacacctcagtcgcgccccttccctgacgccagctctgcacaacacaccatcagaaaactacgcattgctgcttcgtcctcctcaggcttgccacacatcccctttgccaggttcagatcgcttcctcagcacacacgcacaagaccagactgctccattcgccagaactcaaggccccagaacaaaacacactcgcagtccgcacaagtcgccgtctcttcctcagccagagcgtctcgcagctctccattctcagaaacgcacgcaccccagactctcacccatgccaacacacgctgcagggaactgagcagacctcacgatcacccagagacccccgccaccgcttggccaggccatgtaagaaatagacaaccagcacttggccagtcgtccacagttctacaaccgacacgccgtactcgagcctgtttccaaacccttttcgacttgtcttcaactgctttcgcatgaagtacctcccggcacattttccctgcaaatctatcgctgctgcgttttgtccccacattaccgtgtacccgcggtctgccccctcactccctcccctttatagtggcgcctgtcacgtgaatatactgtaacaggcatttaggggcgtctcccctaaaatacacttttttgtcctttttatgttttctatgttttgtgctttgtacccactctacgtgctggcgccaggtcttttctttactgctgcagctccctgccctttttttgtttttctcacctcccgccttcgctgtctggtagctgccgtggtgggaaaaactcgaaaattaaaatcttcgatgcccctgccgggattcgaatcgccgccgcctccgaaaaaggaaaccgccgtgcagcacgacacaggtatcctgcacgtgatagtcacgtggaagtcacgtgaagggcaaaacggcctcctggcacccccactaggtggcatgcaggggtattcggaccccctcattgtggatctgcacatatcattccctgtttcccaggtatttcccccaatatgccggggaaagaggtgcattttggtatgtttttggtgtgtatttgctgcttagtacaggtaaactgctgctgctatggtgtagagatatacttttggaaatgtagtttgtctgtgaagagtggttttgtggagattcccacgttgttctagcgttgtccccaaatgtttttagaaaaacatctattttgcattatttttgtatggcagcacccctacatatgcacactttttagtgtcctatagtaatctcctgcccatatttcactgtattgcaccttacatcctcgagttccctcccccccccccctcagtttcttccacttggccccctcagcagcctatatccacagtctaaaaaagagacaatccttagcatatctcccactttcatagtgactaccccctaatattatgtgacattccagtatattccactctgtactaccccctttgccctcttttttggtctctccaaccccctcccccatataatcctcacaacctctttccattcgacccccctgcaaaatccgctattttcccagattttattatggtggccactctcatcctgacccaaacaactctcttatatatttttcccaccacaaaattactatatccctccagttttggcctgtagctgctggctttcccccgtatcttcccaagtttcctgcacctggcctcacagcaactttagcataaaacttgagcatgccccatactatgcagtccacctgcccagaacacctgacctatatgattctgcagtcccgattcacctgtaatccacctgatctccctgtcttttgcccattcaccatacaacatttcccaaaaacctctattttgtggcactcgtccccgacccttggccccctcataatcgaccctccacatgcctctaccgcctcaactactgaacataccataataaaccaccctttttactcctatatccaccctgttctggtcggtaacgccccttcttccaccactttccccagtttccaccactctccctggggggccacttcccaccttcttccgcctctagcttccaactttactatggccacccccagatgtgagaccaccttccccaccaaacaggagatgtagaatacgctggtcacatcctcttcccatatacccctttctgtgacatacgttctattgtctttttggctccaaaactctgaatctcggactttttctatggtcaccccccaatgtaagaccatcttccccactaaactaagcatcctctttctagctgtcgccactaaaacgtcctagctccctgtttcccccaacttccaaccacgttttcccactcacacccagaatcgccgcttttggcccacttccccatgtttccacacatcactttcccaccaaaaacattttttgcactaaccctactctccgtttcatattttgtttattttgcagcacatatctccatccacattcatatttactaaagttaactttttttcactaaatgtcaattccatgaacactccttcgccaccccccattttgagacccttccctcagggtttccccaggtctaagtcttctgttcgattcctcgtcgtcactttgtggggggtcacctgcgaaagttttgtcgtagcggctcccgttctcaagatagccacacttactatggggccatgtttccaagcacagcagtcatatagagggtcattctgttaaaatgtcggttgcggccatatctaccagaaagcaccgtttcccgtccgatcaaatataattaggcaaataaaaagcaatttgaaagcttgtcagcgattctttttattgtaaactgaatgtttatattcactgttatggatatattacaatttaaaatcattttatataaatcaccgtagaaagtgattgttgagaatgagcgcctgtattcactggatatatactaaacattctcaatattatattaaacagatttagtatacaaaattataataaagttcttcactttctttctctatatacaacataggaataataatatacaaacattgtaaataagataaaaataatgtatgatgaaatccttggctttatatatattaacattaagccattttcctctgcgaacagtaagatgtttaataaacaaactcaacaacttttggtgacctctcaacaattattactcaacaatttatcgtttagtgtctactaaaatcttattgttctatctatttcattatagaacattctatttgaacacctttaatcagaaatatacgtaacgtactgctggaataattttgaaccattttctcaaagaagatgaacatgtgtcatgcacagtctactgttgcggagatatttcaaacaatttcagtattaagaaaaaagactatgaaatttttccacaagtaaaaaatatacaaatgaataactttattcattaaatttccaatctggatgaaaaatatatatacactgtatttttatattttatttataattcctctggatgaataatattggtatacatatcttaagcgtcggtggtcatgttatatgttattattatattaatatgtagagtaattttccttcgatctcttatttagaaattaataattatataaatataaaaaaaacatacgataaaatgtatataaattattcatccaaattggaaaattaataagtaaaatagtctacttatatatgtttaccttttggcaatttttcataatatattaatttattttgattctgtttgatcttatctccgtaatattgaatgtgcaaaacaaacatttttcctctttgatatatttacatgtttcccaaacaaatagtatatcattccagcaagattactatcatatatgaatggaatatatttatgggacccttatttggaacaaaaataatatcaatatgtgaagttacccatatactttcaacctgaacaaaaattacataatgtaacctttcataatctttacatactttgttataattcatgaatcacttaaaagaaaacccatcaatactttcgctagttatcacataaaaataattaaattactccaattgttttaaaagtacatttactttaaaataatgacgaaaattaccagttaaactggaaattatatttatattaaaaatcaatatattctttaatcttagatgtaatgattaaagttaaataaatatatgtataaagtcaaaaaagtaattatttaaatattgtggagaagatttagaagattaacaacttagttcattatagctttccctgtgtgtaatttttgttgttcatataacttctattttttcattcaccaacaataatactttttatttatagtaatattcactttatttaatgtttaataataccggtcaattcatacttaattatcatccacttcatccattaatatttgcctgacaattctaatatatatactagttcatagttgctgtatttcatacttttaaagccatatttatcaatagcttccaacacaaagaaaggctatttttttgagtgcaataaaattccctatactttttttatatatttttaaaagtactaattagttaaatttttacaataaaatacataaaaataaataacacatattcctgtataactttagaggaacaataacaaaaaaatcgagaataacaccacacaataaagtgcttttttttacaatgagcataaaaatctaatatatggccactaaaattttttaccattattactatttataattctaatttatttaaactaaataatctctttactttcatatgtagcaaaaaagtataattactattatttaatcaatgatagatttatatcaatataacgacaaagatgtgcttttcaatctgttaattagaaacactaaatgaatttattaggagactgtgtatttacatgatataatattgcatgctaattttatataaaatactttatttaatcatcaggcgtttaacttactttctaaatatgaaagtttaggtatattattaacattacctaaccccacaatagaaattggtttattttgtaatctataattagcccacattactatatcatctttggtaattctatcgacttgttctgacacttcttctggtgatagtcttttcccagtagtaacaatttgcctacccatgtcctcaacaatggcggttgagttatccaaagataataataaagctgcttttaattgtgcttttgctcttttaacttcaccatcagtaacattaccagctttaatcctactccattcccttaaaacttcatctattattaacttgggattatgttgcttagaatcagtgacaatgtacatcccccacaaaccagtgtcagcatatgaagtagaaaatgacatgtatgaattggcaagtgatccattatttgatgcagctaccgctaatggagaaggtgaatttgtcccagcaccaatggctctatcccaatttcctacaatagcttgagtggctaacgcaacaaaataatcaggtgctgaccatgatacaccttctaatgcaattgcaatatgagttgttggtaatgatgattccttaataaatctttcccctctattgaaaatgggtaatggaccacggggcgaacctaaaggaactggttgttcagacataggtaaatgaccaaaagatttttgagcatactccaccaatttatcatgatccacagaacctgcacctgcaagcaccattctatcacccttataattttgggtaatataatttacaagatcctttctttgaatagatttgatattcttgataggtcccaatattgttctccctaaaggttgatccttgtatgcgatttcatgtaagtgatcaaatacaacttcgtcgtacatcttatccacttcttcactctctctaatgataacatccctttctctttcaatagcccttggatctaagactgatctagtcaagatatcactcaatatatcaactgcctttggtatgtcttcctttaaagatttagcataataaactgtattttctctcgaagtatatgcattcaaatgagaaccaatgttttcaatttctaattcaataccgtgctgtgttctattttgagttcccttaaaggccaaatgttctaaaaagtgggctgtaccattattttgaatattttctgcacgagatcctgcatcaacaaacacacctactgtagcactggaggtgtttggaataaattcggtggccacagtcataccattagaaagcgtagaaatctttgtcttaggaatagtactggccaatcttttgattgtattaagttccaatatcgaacgtagcatattttattttcttattcttgttgagaatttcctatttgtaataattacttattgtcctgctaatttataggtgatgcaaaaaaaaccaaagtttaaatgtattgcttttaccccatcacacttttatcttactgtaaaagtcaaacatccatacttatatcagacagtttgacaaacatctgtgggctgtgttacctttttaacacaattatgcatcctactgatccttatttttttcgatgagtaataaaattaaagaaggtctggactgctctctctatttaacaaaaaatgtaatatcatacgaaaacggcaagccaaactatttatgtgtcaatttctataagattcaatcaaatagaaatagacaattattgtacagaggcaaatacaaagaatatgtttaatttatttcatatatctatatctatatatccatatacatttcttctttaattactatgtgtactgtttaatgttatttttgacagtagaaataaaattatccgaaatggagtcttgtctattggcaatatatgcattgataattttactatctacatctaataaatgaccttccatcgtcaaagattctaataaatctgatttcacagtgaaaagattagccaactctcttaatgttgaaaatttatctactaaatattgaatattccacaattcgattatgtttaaataaccaataatatctttggtaacaataattccacctatagaattaacaggaaatttactataatgtactaataacatattatatagaatttccccaatctttataagaaatttattcaaattctttggtttcaaaaaattgttggcttgtgaatgaattttatttaagaaatttacgatttcaatagccggtaccgtatcatgatcaatcaaatcttgagtctttggaataaaatcctttctggtctgttttgctaaagatgtagaaaaacactcagttatcatatcaaccaatttagccataattatattaatagatatttcgcttttttttatattaatattggttaattcaattattaactgtttatttttaggtgaatttttcaataatggtaaaaatactgattttattgaaattgagagatagtttaacatctctgtcgatttggaaatgtaatctaaacttaataaatctagagaatcgtaattagtatcagaatttatcaatttatagtatgcaatttctaaacctgagtcaatatatgatccaataattccaataaacataacctccaacaattctaatgtatattcacttgccttatttggtattaattccatgatccttgcaactgcctcaacaacacattttaacattgcatcaacattttctagatcaaataattcaaattgatcttttgaagacaaggacaatgattccggtaccttatcctcacctgtatcctttattgtagagttatcaaaatccagcctccttttaataacattcttatattgagatagtttattattaaatattccatcattaaaaaacttatgtccaagattcatattcttattgtgactgccaacaccattgataatatcattagagacaccaatttcattaatattcataaagtcagtcatatcttccccattctctatcatcttatttaattttatgtttaatgctctaggtgttatttctttactaaaactagtattcaattttttagcttttccaattagtattgattctaaattttgcttttccaaatcgaaatatcttgatctatcatatagataattggagaaaagatcagagtaacattgttccagagttgaaataatctcaccattgccgttactaatcagtccatcttggaaaaaagtagacaagtcctttataaattgacccatcaaagagtgtaaggaatgtaaatttcttatatataaaagatttgaccaatttaaggaattgaccagaatatggtttatttttggttctaacttttgaacaaatatccgttgaataaataactgtaaaacttgtatggcctttttatcaaagacttgtattacaatacgtgattccttctcaattacggaagcaatttcacttaataacggtatcataacttttttatcgtaaataacataatggtaatcaggatttaaaagattttgatcaaagtcaaatttttctgttccattttcatcattaatatcaaactgattttgttcaacaaaaaattcatgttgattgatgaaatttgagataacattaacacctgcattaaacttgtttaaaataatagcgatttcatttaatttagtaaaatcactatcacgatatgcatgattaaactcttctaaccatttgttttccattgattctgcaatagattcaattctctttgttgcatcaatagttttagggatagactgtgtttcaatctttttggctaatgctatcaaagacttcataattgcagctgcattcaattgatttccaaaatgtggagactttaataatgctgctaaagtcggagaactatcattggtctccagaaattcattataaatattgaccaattctacagatttagtatattgtttcttttgtctaattgatttttctaatttatcccctaaaggtttaactcccttagtaactgatgccaattttgaatctaatgatacatattcagttgttatttcatttaacctcgattgtagttctttaattgcatatgaatgttttaattcttgttcgaggacctcgctacctaatttacttttaatagcttcactttcatgttgcagttttgctaattcttttaaaatagattcgaatgttctaacataaggtttaggatcccatgtaccaaccgctccataaccatgatcattaatgttacttggattactgactaaacctttggttggcactcttaacgtatgatccttccctaactgttcaacaaactcgttaacagttagcccaccgagtaaattatctctagtcaacaattttttccatttactatctaattcatataaggaattcatctttccatagtgctaatgcaaatattataggaatgaaacaaaaaacaaaaaaaaaaacaaaaagataacaaaccttaaaagtaaaaccaaaaaagaaaaaagaaaaaagaaagcaagaaagctatggtgtttcttaaattttttgtttctctttctcttctccttttttcaaacttacccttattgatccgaatgatattaagttagaaaaaaacagttgaacaagcaaacacacgaatacaattaaagactttcatcaacttgttttgatcaaaataacaataataataacaataacaataatggtaacaagagatacacaaataagggagattgattaactctttataatgcttattcatctaatgaaaaagaagacttacaagaagactgtctgtttcaaacatccgtgcattagtagaaaaggtctcacagtgtaaatttattttttttttctttttctttgattcacaaataaagtttgatagaatttcctagttaagacatcattttccatttgaatatatgacaaattgtggaaaaacgaacaaacaaacatatttttcaacgaattttgtatttgagttttaccattgcaaacattttctatctttaatcctctgtacaccttctctcatcacacgcacgcacacacctttgcgtcttcgtcatggctgtcgctattgcattgaacaattgtagatgacgtttgccatgatgatgagttaaaaatcaagttcaagtttgaatttatcaatcacactttcttggttaacactctcttaaagcatcgtttatttttcagatcctgttgcttaaccattatctatttcttgctctaattgttttatttaacattcaaagaggctgagccacttggtgagaaagaagcactataacttgttatctgctgacaaaccaagaacctatcaaaaatgcaaatttttgttaagactttaactggtaagaccattactttagaagttgaatcttctgatactattgacaacgtcaaggctaagatccaagacaaggaaggtattccaccagaccaacaaagattgatctttgctggtaagcaattagaagatggcagaaccttatctgactacaacatccaaaaggaatccaccttacacttagtcctaagattaagaggtggtggtaagaagagaaagaagaaggtttacaccactccaaagaagatcaagcacaagcacaagaaggtcaagttagctgtcttatcttactacaaggtcgatgctgaaggtaaggttaccaagttaagaagagagtgtgctaactgtggtccaggttgtttcttagctgaccacaaggacagattctattgtggtaagtgtcactccgtcttcaagaacgttgcttaagtgctataaatagcgtatatacatgtatttctatatatctatttataatatagttgtttaattaacattcttttttactgcatcaaattttttcgttgttatgcttttattcattctgttctgatatttgagatgcaaaggtgggcaggggaaaaaaaggtatgtattttcgtagtgttaatatatagttagttttgtgctagataataattaatttcacttggatccagtcaaaatgtaaaggacacgaaaaaagaagaaaaaataaagacaaaattaaaaaaaaagcaaaatatattaaggaaaatgtctatatattattataataattgcaatgacaaactatttacattgaaaaagaatatattgaataagtaagtaattaataaaatcgtgcgaggatcaccatcagtaataaaaaaagaaaaaaagacgattactaagcgacttcgatgcgtataccatgcttgttatttctatattctattagggaggtatatgtatgaattgaatattttttattaagatcttgcaaaggcatcgttaaagatatcataataatccgataatatagtacattttctctcaatatcttggaacatattgtaacgtttaatatcatccacggtttcattgtatttgttgacaattgtagtacttatctcatctgtagtgtcattaaacattttaagtaccttttcaaacccaatcttacccttttgtgcattatcacaaaatctttttatggaaaactcctccattgaatcacagatcctactaaaagtcccatatgcagtgatccttgcttcttgcttgaaaatagttttctcgtgtggggcaactggatctggaatataatcgacagactcaaatactctaaggatattaacataggacaaattacaagatcgcatcttcagtgatctttccctcaaattaatggtagaaatctccctaacataacttttattatccttacacccaataagagtcattatccagcgtggaacaccttgttgcacagttattaaacgttctgtcactaaaacgttcccattatcctttacttccctttttaaaacgtcaactgcaatgacatgggtagaaacttcatttggatatttgttccaatttgctgcagtaactctttcccatggataatcaaattcggacgtattagtaaataatttcatttcttgtttctatcttttgccaaatatatggctgaatgcgagcaaacttgtggcgaataaacttctataagagaaaataatcagttggagaaaagacacaaagattttataagctgagcgagaatacctcttcccttatgagatatatattgacacaaaaattatttctatttgtatatatatatctgtgttaattataccccttatattaaacatttctctcttcattcacaccatcgaggttgcctcttatagtagagttttcctcacaaacaaaacattttctattttctattttcaatatttattttttctattttattctctttttctttcccgtttgatccattttgaattaaaatgccgataaaggaccgactgtggtccacaaaacaataggaaatgaaagaaggataaatgacaaaaacaataaaaacaaaaataataaaaaaactcgacgccatcacaagctgttttctcttttttttatgattagtttaaacttgggaaggagagaaacagaaggaaccgcaaagagagtcacaacagcataaaacagaggggagtccaaaatccaaaatccaaagttcagaattcagagttcaaagttcagagtttagagtttagagagccagagagtgtagaggatgattttaattacaaacaataaaaggagagaaagaaaaaaagattagttgagttaatgttacactgcgatttctggagatgcctcatacattctgttgtgttataaaccgctgaaacattgttaatcaatgtaatactaagtacacacacacacaaattctcatatgcctctttcaaattctttaccacttttgtagtctccaatccccacttctagatactctgtctcttggtggccacagattaggtccacgaacttgtcccatcaaagaaaacatgttagtcacgcaattccctctatcaaagatatttgtggatacccttttaatccttggatgcatcactggatttttaacactattatcactcatggtctttaagtactctcttgttgtttgttgtgttgctgtcattgcaatgtgatacaataaaaggataaatggataccatatggtcagcccaccgtatataatcaagaaaacagacaccggacttctcttgacaacccaatggactctgtgcagatgaattagagatgtaattatcagtaagcttgatgtaaacgtggatgcaattaaaaatgatataaaatagcggtaatttctttgtccaacacaattgttaacccacatacaatggtggtcgtgtgtctggatgcaaacatcacatgtaggacaatggtgtgatcttggtggcctccatatcttacaagtccaacaatacttgatatcgatggtgttatttctctctggatgatttttcttggacgtgtgtgcaggtaatgtaataatattgtaataatcttgtggagtaaaaaattgtgaaacaataagattattattattattattatcaaatgattgccactgacctggatgaatattccttggcaacattcctggatcgcctgtggctgttcttagaaacgttaatagtgtcatcgcccaaaaataatagaataatacaactaatgagattaatgataagttatcatgacgacttacattatatggtgtctcaaatattgaaaaaagcacacacggcataataataataacaaacacaataacaggtaaatacttataccaactcataattctattagttcttagtctgccacctagacaaaaaatataatttgtaacgctaggtaacgtctcgtatgccctttcagtccccaaagataataatgatggtgacaatgatgtttcatgatccaaagtgacaatccatcttacaaatcgtcgccagcgggttaccattaaagtatacttttgtattatacgtttatgaaaaaattttgtaaataagaaaatatgttcttttctcccctttcctagcttacttaatgaaaccgtacaaaaatttttactaatctacttttttctcccttctctcatatatatatatatatatgagtaaatctgtacaaatatgcatctttttaatgatcgatcttcataacattaattgttatctgtcactcaacaaaaaccaaaaaatcaaaaacaaaaaaaaattaataatcaaatatatacacaaaaacaaaacaaaacaaaataaataaacaaagaagaaaaaagaaaagaaataaaaaaaataagagagatcaatcgagaaggaaagggtgagctagaaaataaaaataccaatacaattaagttgattcaactgcaaagaattaatagtcactgaagacttaatttatttcgggataaataattattaagataaacaagaaatagaaaaaaaaagagaataacttataaacattgacttattgtacaagaaggcatataaggcacaacaaaaatcgtatagcccatattctaattttcgtgttggatgtgtgttgcttttaaaaaatagtacacttgtccaaggagcgaatattgagaatgcaagttatggggccacaatctgtgcagagagagtagcaatgtgcaataaacaaatatattttccaggatcacagaaagaagatgactatgaagtgacccaggtagctataattggatcatcagttgactatatcacaccatgtggaatttgtcgacagttcctacgtgaatccctttccctaaccacacttattactctgtttaactacgatggtactaaatataaagttacatctcttgaacaactattacctgagagttttggacccaatcatttgtaccagcaataaatggagggcaggaggggggcggtaatagtgaaggtggtgatgatggtgatgatgatgatgatgagaaattcactccaaaagttattgatctgtatttcacagatcaataaattaatgaaataagcagagcattagcagatcatacaaccatactgcaaacacaacactatccccagttctgctgaagtcatcactcccacttgcactgacactactgtcaataacgatatcttttcaacgaacagaaggaagtcgaccatgaaaactgtacacacccagacactcacaggcaacctttccaatttcagttgcgtatcgaaaaaaaaaagaaaaacagaaacaaaagaaacaaaagaaaaaaagataaaagacaaaaaaatgcaattttgagaaaaaatttaatgtgtcagggaaagtcttctaaaccgagaggggaaggggaaataccagcggagtgaaaaaattttttatgtaaacgtcaaaagtaatcaaatgattaattacttatattatttatctactttatatagataaatacctgtgtatacttctaaatacaatacttatattgaatattaccattgtaaaatattatatatagacaaatcaacaaaatctatcaaagaaaagaaaaacacacacacacacatacacacatcttcacatatgactactaaggtgtattgtgcagggttgcagtgtggtaaagaaactgattcccaactaaaatgcccaatttgtttaaaaaatggtataatacaaatcttttgtgatgaaacttgttacaaaaataattataaagcccacaaagctttacattataagagtgatgatgatcattctccatatgacccattccccaaattcaaatacactggtcctttaagaccacactatccgttgacccctaaaagagaggtccctgatgatattcctaaacctgattggtctcaaaatggtctacctatcgaggaacaaagaaacgatcgtttaagctcaatccccatctataagaaagacgaaattaaaaaaatcagaaaagcttgtatgctgggaagagaagtccttgatattgcagcagcagctattagaccaggtattaccacggacgagttggatgaaatcgtccataatgaaactattaagagaaaagcttatccctctcccttgaattattataatttccccaagtctgtctgtacctctattaatgaaactatctgccatggtatcccagacaaaactgtcttgaaagaaggtgatatcattaaccttgatgtctctctttactatcaaggattccatgccgatttaaacgaaacctattatgttggtgaaaagatagataaagaggccatcaatacagtggaaactgcaagagaatgtttgaagattgctatcaaacaatgtaaacctggtaccacattccagtctcttggtgactttattgaaaaacatgccactcaaaataagacttctgttgtcaagacatactgtggtcatggtgtaggtaaattcttccactgccaaccaagtatcccacattatgcaaacaacagaactccaggggtcatgaaaccaggtatggttttcactattgaaccaatgatcaacgaaggcacatggagagacgtcacttggcctgatgattggacttctactactcaagatggtaaaagatctgcacaatttgaacacacccttttggttactgaacatggtgtcgaaatcttaactgccagaaacaagaaatctccaggtggtccaagacaaagaattaaataaaaaaatctatgtccacatacattcttgtatacacaaatatatatatacacaattgtatatacaaatatgttagatagaataactcaaaattgttttaccaatgattaagaaacgttagtcattgaaataaacaagtaaatatgaaatgatgctcccaacaattgaaacctcgtttattatttatagtattcttcttttttttttccttttgcctctttttactttttattatatagagtacacataaacataattgtttgccttttaaacataaataaggataaagccatacctgaaaccacaggtactgatcgcaagcacttctatcatctccattatcaggaatgtcaaatgtacttattaatactattaaacaagaatgacattatgacaacacccatacatcttcaatgtcatgtgaccgaaaatattttaacaatctcaaaggaaagaaaaaaaataaaagaaagaaaaaacaaaaaaataaatcacacagaaagcagagaattggtatctcaccttcattttgctcaaataattgacaatatagatgtgtgtttaattaactatcttaaccacgaatagtgcgaaatatcagtacatacccactgaagtaataagatcagagttgtagtgttgcataagttagatttagttttgtgatatccattgaattgattaactaacatcttataaatatctgtctctaaacaagtaaaaaaagaaataaataataaagaagtaggacgtacaagaatagagaactataataataaaaaaaatgtctttacagttattaaatcccaaagccgaatcgatccgtagagatgcagctttaaaagtgaatgtaacttctgctgaaggcttacaatctgtcttagaaacaaatttaggtccaaaaggtactttgaaaatgttagttgatggtgctgggaatataaaattgacaaaagatggtaaagtacttttaactgaaatgcaaattcaatcaccaactgcagtcctaattgctagagctgctgctgcacaagatgaaataactggtgatggtacgaccacagtagtttgtttggttggtgaattattgagacaggcttatagatttattcaagaaggtgtacacccaagaattattaccgatgggtttgaaattgccagaagggaaaccttgaaatttttagatgactttaaaattgaaaaaccagtgactgatactattgatagagagtttctgttacaagtggccagatcatccctaggcacaaaagtaaatcctgaattaactgaagttttaacgcctattgtcacagatgccgtgttaaacgtttatgatccaactaagaaaaactctctagatttacatatggtagaaattatgcaaatgcaacatttgtctccaaaggacactaaatttgtaaaaggtttagttctagatcacggtggtagacaccctgatatgccaactagagtgaaagatgcatttgtcttaatcttaaatgtttctttagaatatgaaaagactgaagtaaattctggtttcttttacagttctgcagaacaaagggataaattggctgccagtgaaagaaaatttgttgatgccaagttaaaaaaaattgttgatttgaaaaatgaagtatgtgggatggataatgatagaggatttgttattataaaccaaaaaggtattgatccagcatcacttgatgtattagctaaacatggtatcctagcattaagaagagccaagagacgtaatatggaaagactacaattagtcaccggtggggaagctcaaaattctgtggatgacttatcaccaaagattcttggttactctggattagtttatcaagaaacaataggagaagaaaaattcacctatgtcactgaaaatagaaatcctaaatcatgtaccattttaattaaaggtgccacccaatatgcgctaaatcaaacgaaagatgctgtcagagatggtttaagagctgttgcaaatgtactaaaagatcaaaatgttattccaggtgccgggtccttcttccttgctgcttctaaccatttacaaaaaagtaatatggttaaattgggtgctaagggtaaaacaaaaactggtgtacaagcattcactgaagcactattagtggttccaaagactttagttaaaaactctggattcgaccctctggatgttctatctctttgtcaagatgaattagatgataatgaggacagtgaagagcgtagatatgttggtgttgatttaaatatcggggacacatgtgatccaactattgagggtatttgggattcataccgtgttatcagaaatgccattaatggtgccactggtattgcaagcaacttactactttgtgatgaattattaagagcaggtagatccactttgaaagagggaaatccacaataaatacactagtaaagatcccattttcaatgagtatatatatatatcgtcacatctatagtatattcatatttagatatacatatatttaaattgtcccatacaataaattatccatctacattctaagacaactaaccatttcttactaagtagctactataagctgagatttacaatactaaagaaagcaaatgcaatatctttctatccatcactagttattcctgaagtaaactcaactgtcgaaatatattgcatatccattctttaaataccttttttctttgaaatctgcaaagcaaaaaaaaaaataaaagccaaaaaagagaattacggtttcttttaggaaaacgtttacgataaaaagaagaatattagaacataaacatgctatcttctcaagtctattctaaaaaacgagattcctcaactagtctcctacttagcaaatcactctattgaggatcaattgggtctatacataaaatatatttgagtaaaaagtgaagattaatattaaaaagaagaataataaaagtccaaatgtcaactcagaattatccagtaatagaaagaggacctagtttgcgtgacatgcaggtgtctgcaatcttaaaaatgctatttttaaataaagatacagaaaatggcaatttagaagacgccttcagtgatcaagacattttatggaaagtgttagtccttgataagaagagtactgagatcatatcttctatcttaagagtcaatgatttattgaaagctggaattacagttcatactctaattaaacaggatagagcaccattacctgatgtttctgcagtctattttattacaccaacagaagaaaatattgatctcattgttaaagatataaaagaagaaaaatattcagaatattatattaattttacttctactttaaatagagatttattagagaaattagctcaggaaatagcattaattggtcaggcagacaagattaaacaagtgtttgatcaatatttagattttgttgttaccgaaccagaattattctctttacagattgataacacatattctcagttcaataacagaaatgcaactgaagaattaattaacactttatgcgataaaattgctgatggtttattcaatacagtaatgactactaattctatccctattattagagcccctataggtggtcctgctgaaatggtagcagaaaaattgggtaacaaaatacgtgattatgtgatcaacaccaaatcctctggtacttcagtattaccaaataatgacaatttagaaagaggtgtcttaattatattggatagaacaatagattttgcatctatgtttgctcattcatggatttatcaatgtatggtatttgacatttttaaattatccagaaacacaattactatccctgttaaacaaattaacaagaatgacagcactagaacaaatcaagatgacaattctgataataatattaacaactatgccaatcaatatatcgagaagcaatatgacattgaaccgactgatttcttttggattgaaaattctcatttgccgtttcctgaagcagcagaaaatgtcgaagcagcattagcacaatataaggaggaagcagctgctattacaagaaaggctggtgtcacggatattacagatttaaatcctgcttccaatagtgatacacttcaaatacaagaggtagttaataaattacccgaattaactgcaaggaagaataccattgatacacatgttaatatttttggttcactattaaacgaattagaaagtaaaagtcttgataccttttttgaaattgaacaagaccccaataacgcaaaacttagaactaatttcatgaatattttaaacgataacaaaattaataatttgaatgataaaatgagaactttcatctatttgtttttaacttcatcaaagggtttaccaaaggaattcgtagatgaggtcgaaaaatatttcaaatcacataattatgatattagtccactaaaatatgtttataaattaagagaatacatgcaaatttcttctctaaacttacaaaatagatcattagatgatgggcaagtggcaaacaataatagtaataatgctggttatagtctttcgaaattatatggattgactgagggaaaattaccaaagagtgtaggtaatttaatctctggtattaaaaatctattaccagaaaagaaaacaatccccatcactaatgtagtagaagccatcatggatccactgaacagttcacaaaaaaatctagaaacaacagacagttatttatatattgatccaagaatcacaaggggatctcatacaaaaaaaccaaaaagacaatcttacaacaaatccatggtctttgtcgtaggaggtggtaattatttggagtatcaaaacttacaagaatgggcacattctcaaattcataatccgaagaaagttatttatggtagtactgctattacacctccagatgacttcttaaaagaaatctctattcttggggctgatgattgaaaaatattgaggaacattagacaataatcatttgatttcaatagtcaatatatatagatgtatgtatatatatatagttttatgactatcgtcttaatatctcttaaatattgtaaaaaataaacagattcagaatataagatcgttatagtatataacacttattaatatttattgtgattcaatatatatagagtatcaataaaataaagacataaaaaaagaagtaaaaagttataaatagtttttagtagtctctaaaattttagttgatctcttagcatccaaaaagagtgttttagcttcttcgatatcgcttactgcaatttcgttacgtccaaaagtttgtgccagtatgcctgcaggggataataattgtaaagcataacgtaaagaagtagcaacacctaaatcagccaaaaagtctaaactttcatttgttaactctaaaccctccactttggatcttctttcaataattgtacgaatctcatctttattatatggtaaagtgcggacaatcaataatctatcaattaaatcaggtggaataccatgtggagaaacaatatcctcagtaccccgaacggtagtcatacctctattggatgcaaggacaacaataggtgcgatatttgattccaacgctctatttaaatatgtgaatatttcaatatctagcatattaacctcgtcaataaataagacacctggaactagttctgctacaccttggtctatatatttagccactactttattaacttcttgtcttaatttttctgttatctctgttttcttaggttttaataattgacccatcattgatactacatcttgaccaccttgaggtctggcattggctacatccaaatcatgtaatgttacatcttgtacaatttcttttttcttatgaacttcaccctttggtagtggaacgtattcctctgtctccaaatcaaattcagtggcatatgcatctgatctaccaacacgtttcactgcaccagtattagattcaatataaatgacatctccaacattcaccttttctctttgaatactttcatagatagttggatccaatcttaaagtctttgtaccctttgcagattttaatccaataataacatgtgatatggtcttcccataaccacctaatggattttcagcatcctctggtgtaagttcagtgacttcaccctcatagacttcttttgtttctttaattctaagaccgatagctcttctaaagttctccatcaaagcttcagtctttttaacttctgcagaataaagttcactaccaacaaggggacaaaatggaacttttggacccaactcttgactaatagccagagctaaagcagtcttaccggtagatggaccaccggccaataaaatagcttttcctgacattttcttagctttaataagatcaacaataacaccacatgcttcacgagcagctatttgaccaacgaaaccaccttccacagatttagctaccccttgagaatctaatccaagacctttaatatgtgtatgagcagcagttctatttgcaccatgctgtgtagaattagaagatgcaactttattattattgttgttgttattgttagttacttcacttattgccaccattctttaccgattcatgtaattatatcttgcgggacacaatctcacctaaaaaaatattaccagtatcctcgatgcaattctgttcttaacactccgacttacgcatagaattggaaatagagcagttgtttacaggatgcatctacatatctcttattaacagtagtatcgcacatttccaaaggtatcttacaaaaatttttcgtctcctacaaatatcgtgagacaagattagatggtgtgtgggtgttatcaatacaacactcatcactataaaccaaatataacttgtcacaatgtcagaatgaacttgaatggaccatcaataagtctctaaggtaatcatactgttcaatatatttcattacatatatatggctttcactattaaaatctctttaaagtttatctatgctaacattctatagagtcaatataatatacgataccattctgtaaatactttataaccacaaaaaggaaaaaaagaaaatgagtgcttataacaaatggacaacctcatcttgcagtcctctcctcacctttctatgtgcttctattttactgtatccctattgtttcataaatcttcaatatctatttgatcatttggctcctttggttcttgagcttctgcccactgtgtaacatcgtcaatgtacgatataattgtagaaacactatcaggattctctgcttccaatggtaaaaattgtaccatgccaaaatcgtcaactaattgtgcaatacattgatttaatttatggaattttgcatttgtttcttgattaacagaatctgctaataacatcgaatctgggtttaaaaatctcttcaactttcttttactatattcattggctactaaatcaactttacttaaaatattaatatgaggtagctctaataaaatcatggctgacattgcagataatgcaccactaaaaaatttagatgtatctattacaaatggcgcttctaataagtaggtcgcacatagattgaaattcaattgttgttgtaaatgacgcactatatttggtagaactgggatatgtgtgtacaattcgatctggcctggacaatcaaagatcaaatattcatcattataatctccaatttcttcatccaaccaatccagattttgtaagagatattcaaaacaatatattaatgcaccattgggaccaagtgacatctcttccattacatcttccaaagatatcaaatctctaatatcaatagtaaattcatatttgtttggctctgcagcaggatctaagttcacaatatgtgatctacgaccgatagtttgcatatgtgatacaatagaattgcaaaaggtacttttacctgcacctgcaggtcccaaaaccataacacctactctggacatacttatttattttttctcttcttttgcaatactactttattttgccttctttaatacagacacagttttatacaaactcacttaatatcccaaaccttatctctagagactgctatgtatgtattctgggtaagatattcgtattgcgtatttaatatcccacttcatctcatatttcacactacatcacaagagtaaaaaaaaatccttggttgaaatgaaaaattgtaaaaaatattttctgtcattactataagaaaaaatatataataacacacagaacactctgtaaaatacctgctcttgctaactgatccctgttgttaccaataaaatttgaaggaattgagactaaactagcaatttgtttgaactcctatcaatacaaatatcttttattattatcttttaactattttctactctattttcgttaatgggatgatatgtatcaattgtactcacccagcagaatccctttatgtaatttattcacataaccatattcaattaacagattgctctcattgtggttcagaggttgacaaatatgtggaaattgataatgtgattctttttatcgatctcttacttttaaaacctggtgcttatagacatttagtctataattccttagaatcccaattcttgtccaaaggctcaaccacaaaatcatctaacacaactattaataatccctactattactatttaacaaaaattgttaaaaaatttatggattgggaaaataaattcgataccttgattagactatggatacttttattcacttttgatatttatttaaaatggatctttgaagaagaaaatttaaaaaggggtaaatcatcaataatccttttcaatacattttattccaatctattatccacgaaatatacttttgtttatccttatctctattttgcattgtattctctattagatttaagtatttcccactttttagttcaatggtttatttgtactctaatcggttggggccataatattatatattcaaaatatattatttcttacacaatcttattgtcttatggagctaaaattttcccaattttaatgataatttggccttatgacacactactttcaatgaatattattaaatatatcgcaaatctttatctcatcgaatcacttaaaatagtaaccaatctatcatatttaattgtgatttcaatttttatcatatcatcgttaattaaatttgttgtaatcaaaagtctattgtttattctattaacaagaaacagtaataatcataattatatgacacatttggttacttatttaattcatgaattcaagtcaaccttgcattatatataaatataaatatataggtataaatatttattatatattctttaagaatatttttactcactttccttattgcatttatataaactcctctcaattttgtctttaagcaattactaaacatttattcaaccatgggtttctccaaatttcccactaaaaatggatattcatatgtttcttcctcaaattgtgtagatactaaagaattatctctttcatgttctctaattgaacttaatgcaatgtattgtgataatggcaaataattagtttcaaaatcccaaaggaaacttaaggtaataaatggtaatggtaataaccatgatgagaacacccaaccaccttcaaaccctgctaatgtacctgtcatggtcagttgtgataataaaagacccataataagccgtctaaaaattaatggccaaacttttcctgttgaatgtggtagatggtccgttgcatatattaattgatatttataaacataataaccaataacaaaatatgcaaggcttgatgctactattttagtactcataacactgtaaattaaagttattattaatatcaatatgggttgtggtaattgtaaaccaaaattgaaaattggcggattataaatctcctttctctgtcttggtgtttttgcttgtattttaaccaatggaaacccgatcagactacccactaataatagtttaaatgggaacataccgatgccctgtaaaattattaaatcaacgtaaaataatgaaaattcttttactgatgtggccaattgataagctattttagtagtatctgataaatagccccaataattcgatgcagtaccagctaaagtaaacactaaaaatagattaacaaaaatataaaagaaattctttgacaccagtgatatttcttcttcactatgtgacacaaacccttgatatccagttaaatattcataaaaatatggaatgaccacattcattattgtaaaaagataagttggcaatagccctgtaacaatattttgtgcccattggtttttttccaataaataaccaagtgatggccaaaatcttgatattgtctttagattcaataaagtagccaaatatgatactggtaagatcaaaaatatactacaaataccaataaatacacttactgaatatattttaacaagccggtcctttcttgataaacagacatgatcccatttaatgtcatgaggagctggtgctaatctagtaataaaataatgaactcttggatcaagaaccgcctgtgccgccatttgagcgttagctacagaatccatagtaacaaatgctgtaggtgtagcagaataatgctgttttctggcttgtaaaatttctgtgtcaataaccgttaattgtttttctaaatagttaatagcatccacttcctctccaaaaagtccccataatccaatctttattgttggtctcttattttttaactgaatttgggaatatatcacattactgtcctcttctcctcccatttctgttctcacccttgaattttgcattgtatttagtagatttatactaccatgattttgattattaaatggctgttcaagtagagtttccactataattggattatcagattgcctgtttgaagaaacatatgtatttgtagtaggttttagattattggagacatctgaagtgtttactggagcattattatgatccaaagggtagttttctacaaatgccgaattctcatttctcaaacttcgtggacactcagcatactttaattcaagttgtctcaaaatatgattccttttatgatataatttatttaaacgaccccactccctacatattgtaacagaggcaacttttccaatctttagttgttcaattcttgttgttaatgcttttatatcacgcaattctactggaatcccccataatctaatagttctatctgtgattgtattttgtttacctaaataattttgtcttgtacttacaaccaattttgtctgggacatcagaatattaatagctataaatgtgaataaataagtgaatatgacatacatgcagagatatactcctgcattctctggaattgtatttaatgaattacctacagtccctacattatttactaatctctttgttaaccgtccaactgtgttcgaatatgttttatataaattattagagttattatcatcagaaccatcatcatattgcccagtaaaatgatacctaatcggtgatattataccaaatgaaaatacaatataaatagataataatttaatagccattttgaaaaaacctaaaaacacatatgcatctaatcctgagtattctaatacttgttcatcggtgatattatataaaacgggaatccaatcaaaaagtttattattatcccatgagggaagtcgcagacttccattattcttatatttcctactagcatataacttaggtaactttttcaataacagtgagaaagacaaaaatgcaaataatcctaaaaatgtggcaattgctaactgagtagtcaccaccatggaggtgggttttctaaaatctggagggttacttccattaacactacttattcgtaggctaacaattttatctgggtctgtattatttgtatgaaataaaaagtaatcctgtatcatttctgagttactctttgtttgtctttactattcgtactactggtattattattattaatattgttgttgtaaaagtatcagaaataaatgaataaacatcaaattaagcacagtcagtctgaataatgttgttgtagcttctaaaaacatatatatactttttttcttcaaatggaactgttctttctaattcttcattatgcacatttggtcactattatgacttttccatccttaccaaaatacagaaaaataaaagtactaaaatagtatatgaatcaataaaagtttccttcaagtaaaaaaaagttaccatgcaaaaatgtgttatatatatatataattataacagatataatggaagttaatttataaaattctctatcaacctggttattaaaatcataaatattggatgttctatacaaacaattataaattattatttatgtgtttactttatttgaagtttcttatttgatttaagatctccaatattgggctaaattatgcaaatgatcgataacaatgggtaataaagcattaacactatcattaattaaggtttgaaaatgttctgtagcttcctcttcagacatatcaagattgaaccgttctttaacttttaatatagccccgtcaggatcaatacggatatctggtatatcactggatttcattaattcaaaaaggtttagaattaagccagcatttcttcttaaaattgaatatgctacaaaacagtaacttctaaacttattataattagaggatcctgcaccaccaaacgcctctatgatctgtggtggtagcttcattaatggtgggaaaggtttagggtcctgccccaaaatataaccaaaatccacatggaaaaagtgaccatctgttgttatcagcagattgtctaaatgcctatcaccaacaccaagtatataagttatcacacaatatcctgcacaggacttaacaaaattatccattacccaatcttggacacctaactcagaattggaatccccaaaattacgtatcaaataaggtaaaacaccatggtacttacttaaaattgtagccatagtttcattagggacgaattgcatagacccttcttgggaaccagtggccaatatcttatatggagttagttttaaatcaacattttcgtttttcaataatacatccattaagcgaataatttgaagcacaaattgatcttgccttaaatcgtctccaactttatacattaatgaataagtagaattatcatctgttctaaaagttatcattaaaggcgataatgaacttttgaaaactctagattgttcaggtaccacatcgacaatctttatgcctggatctaatggtaatataatagcctttcctttcaaaaaatgtcttatattagttcttaatatttcacttaataactctgtcttcttagtaatagaatctttggaattttttacttcaagacaacattgatttaaaagatcaactaatgtagcctgttgattcaatatttcatgattatttagatctagtctatcccaaaacgattgcattatttgttgtaaacaaggattatctttggattcagattttaaataccagtaaaagaatattcctaatcttatattgcttaaagctcttgtaattaaaaactctgctaaaggtgaaattacaataggcaattgattctctgaactatcttcaatgtaattattgtatttgctttttgaatttgaatcaggtattgtgtcactaaaactttttgtaacttgtattgattgtataaaacgttggttctgcgaattattgacatcactaacaatagtaaaatcactatttgataaatctgctagatttgatacattctcaaaacacaatgcttgaactagttgtaatagatacaactctaattcttgatcagatgcttttttcaatctctttactgcataagatcgaacagatatatttgtaaaagaaggtcccaacaattcaatcgcatcttcaatatcaatttcagaccaagtattcattaattccaatacttctgttctctctgattcttctgacatattagtactttttaacaatttagttaatgcttttttgttattcattaaatagtaacgatatttccatattgatcccttttcatgagcacttaattgtcgtccagatggatattccattatatgttttaaataatcacgttttttaattgtgggcttaattcttttatcgaaatctgaatgttgtgatgctctttccaaacgtctatatttttcttcaatagggtcataattgtattgatcagggtcaaaaaattttaaagtggactcatgtttatcaccaagggatatcgtcatatttgattcattccctatttttgtggtattttttgtgtcattattgtacattaaattattggtaatgttgctattcaacttttcaaagttatcaaaacaaggaatatttgatggatgttggttagatcctaaatctgtataaatgattggaaattcgtatactgggtattcgagattcaatacaaaagtccccaacggccaacttctcgtcaattttaaattgttcaaattttgtaaagttaatttatctaaccatttagttcttttaaattcacccaaacaaaatttattaagattattataaatttcatcatcttgtaaacattccacactatttaaatcatcgtattgaaatttaataaactcataacctctttttaattgaaatgtgtctttattaaatatacttgttaccagttgatagaaaggaaccctcttaaacccatcatattcccacagtataatgtttaaataacatgaaggagtcaattgttgtgtctgtataggtaaagttatccaataatcccattttctagtccccttaaatggtatatatggtgtaataacgggtaaagtcaaattcctatcactttttttatcgatgacctgaactgacacttgcatttgactacaactgataatattagactctatttgtgtcaattgtgagtttttaattctactggaagcttttaacagtggtttctcgccttctaatgaatgtattttaatttgaaatggcacagccaaatcttgagaaattgcatatgtgatattcttcatattctatttaatagtaacagtagcaatatacatatgttttacttcagacaaataaaactaaatgaaaaatggtgaatagattgaaacaaccaattatctgccataccctttgtattaaattattaaaacattattattattagcgttataacaataataataattgctctttaacaaaaaaagacaacaaggcacagaataaacctaagcaattccgtggctacctatacccttgaactagcctctttgtatatcttaataactgtttctaattattcaaaacagcaggttgttattgatcattggtccatctgtaaagctttcccaaagaatttgtaaactactttacctttagtcacgtgacaaataacaggtttaagttactaacagaaatcgaacactaacttaatctatatatatatatatatatattttttggataaatttctttcaaaattgcggcattacgacggaatttgttagaataaccaagccgtctgcgggtttttcggaatagaagatttaaagaacaaggataataatattgaaaaggaataaaataagtatagcagtataatgataataaagaaaaatgcttaaataacccatatatctagttgttttactgttatcagaatatatcaaactttaatatcagttaggctacatatacaaatgatactgaactaaggtaaaacttagtggcaattacaatcgttattgaattgatcttttttttttttttttttgtttaatttttgtttttatctgtacatctgaaataatttgagaataaatatattgatggtaatatctactggcagtactcaactcacaactctaaaaaactttttacaacactcaaggttttggaaaaagttggtacgttttaaagtatctgtcccaataactactccgattgaacctgctgctgaagttttacaccatttacaattcactcaactacttcccttcaagaaaggacttgaaatacaggaaaaatttgttagagctaatctagatttcaagcaattacaaagtaaaataaaaaaacagttagctgaattacaagaagaatatcctaagagtgtattgaatccagctgagaaagaaattattgataatattttagctatgaaaccgaacccaatggttttaactttccaatttgaaccaacttatacaggcggaaaacgaattaagaaaatgatcacaaaaaatttgattgagcaattcgaaacctttcaacctactggaaaaagtgaaaaaactgttttggcacctaaatttgttcaaactgaacgtggtggtcaaatcactttccatggtccaggtcaagtcgttgcctatttaatattggacttaaaggcttttaaagatttttctgcaaaaagattgatttataccattgaacatgctgcaatgaatacacttaaagaaactaaaatctctgatacactattaaatattgagaccaaattaacagaaaatactggagtttggacaatatacgatgctaaaattgcaagtattggaattcatgtcagaagatctataacatcacatggggtttccataaatgtaaataccgacttatcctatatgaattcatttgatctttgtgggatccataacgggaaacatacatcagttcaagaacaaagacttgatttacaagcagatcctgaaattattgctataaattttgtcaaacaattagccaaattattgggaattaacaaaatagaaagaactcaagtgacaaaatctgatacgttgaaaaaaaataataataaataattaaagatcaattcaatattgcctgtaaataagcacttcacacttacacacttacacatttatacatatatacatacatatatatatataataacattttttaatattaatattcttgtcctcatatttcaagattagtgaaatgattgccaatagtatgttccaatgcatttaatttagatacaatactaattaaacttgggtcacttgtggtggtttgaagtttttcgcattctgtaacgactttcccatcaaatgttatacatctagatataaagtcttgggcttgttgtaatgtggtactttctttattaaatgtagttattataaaattatttaaaagatttgattcttctaatataatattctgctcttccagtatttcattcaattttttgcctctattagattttaatgattctttaattttatcaacaacggatttcccactcactggatcaatatcacaccatggttttttagtcactttagctaaattacgaaaatccatggtcaactcacttttatagacaatcagttccaaacttatcttatgatgtgtagattcacagaactgttcaggattcgcaaacatccgtttcacgattatattgttattatatggaaatagcaaatcttttggtggattttgtaaaatatttatcgatttggttattaattgtaaagattgcttaaatttatctataaaagtaacacaatctttttctacttctaaaccttctaacaatagtaagacctgttgtaaattctttccaatactatctaactgtaacaatgtgaatttcttgccagaatccatcttacatataattattttacccttgtcaaattgaggaaattgtaaagccatttgaaaatcaacaatatttataccatgtctagtcactactccacgtatagaaggagaacttgcattttttttgacaccactagttataggcatcttaaataactgatcactgtacaacatatcaatacatttttccacattatcaataatattaggtaattcaggtcgtatgatttcatttataagccatttttgttcgttttgtctgtctttgttaaagtcatattcctctggtccaccaaaataatcatatgggtacagttctgtgctcataataaaaaacagtaatattaaaaatataaatcagcttagttacaagtaattgaataggaatttcaccttccaacttttggtgtagatttatttactaacaattgatagtagaatggtttctcatgtttctcttatgatggcaatcatgtctcaaatttatttttcattttcttttattaaaaataatatacttttaataagtcatctttaagcaaatacaaaggaatgaaaaggaggaaaatgatacatactaatagaactattgccctactaaacatattctaaaacaaagaagatcactcggacaatctttgtaattaatatggaatatttatacatttttatatatctgtgtggatgcaatataatagttgataaataaaaaaaatgcagataatgataaaggacatcttctcatcacatcagtatgcgtaataatgtatctaaagccataggagtgctatatcttgatttatgtcatagatctactgattcgattatagacgtccaagagaacattttttgattgattagtcctcatccaatagcctttgtatttttcaataatatcgaagactaccatttccttggttaactcccctgacatatctttttcaaatcttcctccatttccctcctttgaaacggcttagtaaatgaatcttctaatccaatctcttcaaatccatgaactaatgctatccctagtgtagtcggttgtaaaaaagtctcctttcctgatttttcacttcgaacataatttctagtctgaatcttttcgatatgatcagcaatagtggcatctgtaccgataccattagtatccattaacacaatcaattcactctctgtcataggtttaggtgttgaagtcattcctgatttcatctctgctttgctcaatgtacaaacagaacctaattccaattttggcaattgctttgtggtttcccatttggcccatgggtagacacttaaaaaattcctttcaagaacaactaacccagtagcagtaaacttctctccgacccaatctaatgttaatgttgttgtctgtcctttagcatcttctgaacaacatgctaaaaaatgtcgtaccacatattcatacacttttctttcggtagcatcaatctgtgcatttttacctaatggtataataggatgaatcggtggatgtgccttatcatcatgtttcccacttctaggaaaagtaaagttatttggagaattttcatctaatagagttgcagcataggatgcccagggagtcctactagcaaaatcctggtttctttgtgcttgtttttcaattaaatcctttaaattcatagtatctgggaatgtatctgtttcagttcttggataagatataaatcccatctgatacaatttttcagcagctgctagagattgttttgcgttaattctgaaatatctagcacaattcttttgtaattcaactgttgtcaatgggaaaggtctgtattttgtagaaggtttcgattttagatcacatactgttgcttcatcacctccaatttcaagacacatttcatataaagatagaacactatgccgatcaaagatatgccctctttcccattgaaatgttgttgatgatgtttcaaatccaatattgttatcatcgttgtcatttctactttccacctgcaattgaatataccaaaattcttcaggaacaaaatttcgtatcctttcaaatctatctaccacaaaacctagtgttggaaattggcaaggtccatatgatatgataattttttcctttttattcccattattattactattattaagtctgacttgctcagaatttatacttgattgaactcttgaagccatagtatttgtgagcaatctagtaaaagctacacctgttcttagatctaactcaatacgggttgctacggcatctacacttttttgatcaagtctctttgggttccttgcagcatagagaatatgacttctttctaaatgtgagaatattgctctataaacattattatctactaaatttctgtttccttgccgtgcttgctggtatatttcccatcctatgtattcaccttctctgtcacaatccgtccaaatcatcaaaatatctgcatttctagcctctttacgtatattacttgcaatttgtttttgattcttatccatagtctcaatcaatggagcatcaaataatgtaaatggatcacttttaccccaaccatattgctgcccatcaaaatctacaccatttaaatgtcctgccacactagtcattgttacttcacatgaataaggtgcaaatgggaatccttggaacacgaaatcataatttttgacatatacataatcagaggccctagaagttgaccttccaccactaaggatagcagctacagatttagctatcgaattcttttctgctacgcacaaaattttcattatagtttgttaaaacataggtttattccaataataataaaatgataactggaaaggttcaataaaaaaacaaaagtaaaaataagcagttggcttaaacttaattaactaagactaaattatagtttcagatcaggcgtttagctaaacttgatcacttgatggcataagctaatcattttatttctctattatctttcttttaatcatcagatagactctttaatgttgttaaaaatcactaaaatcttctacaaaaaaaaaaaaatcaacctacaaacgtacatgaaatcaattaaatatttaaaagaaaaagtagtgtttgttgcagggtactcactcagtcagtctaaagaatgaaagaaaagcttaagtctattcatgctgtgtgtggctttttttaattaggtaatataatggaattggtgtgcttctttgttttataaagtatactggatagaaaaatgggaatatatgatgataagtagcaagcgtaataataataatagtaatatatcagagcaattgaaaaagtttatttttactttagactatgaattgaatagtgttctgtataataatgagtttttaaatatccgattaaaagaacagcatacagttttaagggatcaaatattggaacaaattagtggtttatcaatttcttcaaacaaatcatgcattaatgaacacattgaaccaatacttcctattatatggaatagatatcaatcattatgcattgaatggttttataaatggaagcaattattaaaggaaacatctaacatatctgccaaaggaaggtctcacaataatcgtaaaggtaatattactgttgagttccgtattatgaaatcaaaattatctaagttaatgaagattttccatagattttattatcagattttagaatatattatatgctattttgatacatcgttagtgatatcaacacaggtaactagtggtttaaatttaggaaatcatattcagaaattatctcatttagctaaaaatcgttatttgttgcaaactacagataagggaacagttcatgtggtattgtcattttattattgtctactatatctaggtaagatacggtaccaccaaacaatattagaagatccactccatataaagtataaaaggaataagcatgttgaattactgaagactaatgatattttccaaaaggctaaaagatactggattatggcgacaattgtagtgccatccatggatgagagttataagcaactatctaaagtatttttacattgtaataattattcaaaggcaatattttatcatgtaagatgttattttgccaggtctaatagttcaaaagcaaatagttataatgatattatagattttttcaaagaaagatattggagaagagagaatagacaatttgaaaaaatggataatattgaatatgaccttgtgagtagtactatggaaattattagatactatcttttactaaataattcaaaatttaatcaaacaaacaactcaattgacgagaatggagaaattttagagctgaaatctaatattttattaaaactgcaagatcctcaagtgttcatgtatcatgaattttggattgacataattattactatgatcggaatatcaacattaattatggaaaatagcaatgctaatgataaaaagtcactatcagcggtttcttcttttgttcattggaatgagagaattcataaattgtttataagatttgtattcgatattttattccacattataacatatattaataaaatgatatcctatgatgaaattgatataaatagaattgatccatttttaactattttaagagttatgaattgttggataaaatcacacattcctgttttaaggtttgcacatagatatttacccatttgccacataatatctgaatttattaatcaaattaataaatcttccagatacagttggatttcatataaaaatgaaaaacctaaaagatcatatctatttatggatgatgttttattacgggacttcacatgtattggttatagcttaactgatttcaacgatacagaagtgtttcatatggataactttattaatagattaacaggcaatgcaccaaggacgtgtcttttaagtaaggaacaagaaactgaattaaaattgatagcaattgtaacgtcaatgaaacggtttttacaccataataaatgtggaactacaataaaattgcaagaagaagaaacagtgaaggaaaagacaaagaataattactggtgaacactgtacaaattttttcaagtatgtatgaacaagtttacatatatatttggttatttgatagaattttgtattttgaagatgttcatagtaagtccaattattaatctaaatatcttctaaatccccaataccacactgtatagtatctaataaaggctgtgtataaacatacaatatttgtgacaacagcagtaaaagatctaaagatccttgaacttcacttcccatttctttgtgcctttagatgcggattttttaattcccgtctgcggcataggtagcgactttttttctacaaaatagaatacagtcaatcgagaatcaaaagttcgaacaaaagttctcgaagacttgaagctagatctgtctaggagttttccaagtaaggtacaggtccaaatatgtgtgtataaatgtgtactctctttttattagattcaccttctgatgtttttaatacaaacaaacagtcaaccaaatcccatcactctctatacacgcattattatattgtattattttatttcaattgtaaatggaggtgaaccagtcatctcagcgtaacgatctacctattaataagtcaaattcagtattagcttcaagttttcaatcagataatggtcaaaggtcagaagagtcgtctttagcagtgttacatgggagctttgcacccagtaatataaatagacgattttctataagttccactcctctatcatattataaaaatataccagctcttaatgatgatagtatgatcaaactaaataagattgtcacttccctgccagatgtagattgttcagtttatggattttgcaagaatcaaaaatatgttaataaagtcaatcctaataacaataatagtagtgaatatcctaataaaaatactataaaaaccacatctctaagtgatatacgaaagaaaatatcaagtaaatggccatctcaattgaataggagattgacacaagaatctattatatctaatttcccctttaaagcatctgcacatagatcacagatttttcctgttgtagatacagacactttgatatccaacactgcagacgaaccagtttatggatcgtcaatatcaacagccccaacagttcatactgtatcaaagtctaaatctaaatctaaatcagagttgttagctagtgcctcggcaagaaaagtaatccagaagactagaagtcaaaacaaaaatgatcgtggttcaatctactctatgtctgatcctattggccgtagaattaatgaaaatgatatgaattttaatattgttcgtagtatgttgactgggattagagtgtcatgtgaatcaataacatctaattcttcaaaatactccaccaattctatcgataaatatttttttgatacaaatggtaattttttgggggagaatataaaatcttttgaatcatttggatttgaatttaaagattattttggctccatttttttaaagataagaaatacttttaatgtaggtactaaagaatatttggaatcattgacttcgaaatatgtattaaatgaattaaattcaccaggtaaaagtggatcattcttctatttttccaaagattataaatatattattaaaactatccatcgcaatgaacatattcatttaagaaaatatttaagtacatattataaatacattaaggataatcctaatacaatgatttgccaatactatggattacatagagtaaaattaccaaggtcttttaaaaatagaatacaaaatcgtaaaatttacttggtggtaatgtataatgtttttcccccatggattaaaatggatttaacatatgatttaaaagggtccaaatttggtagatacacggatgtgtgtaatcaaaatagtgaaaatgatattaggaaagatttgaattggatccatgagggtaaaaagttgacatttaacgacagcgaagtaaaaacaaattttctaaatcagctatggaaggatgtcaatttattggctagtatgaatactatggactattcgttgttagttggaatccattttaagaataactctcatacattaaagacaactgatatgccatcattattatccattgatataaagcatgtaaacaattcaatatctaacaatgatttaatctattttgttggtattattgattgtttaacagactattctattattaaaaaattagagaccatagtacgttccattaaccataaacctagcaatattagcgctactccaccttactattatgcattgagattatataaatttattgcattttctatagaagtaaaacacgttgataataataatagtacatagaaataattgcatcttgactaaaaaatatatattcattctacaataaaaagaagcctgtaaaccactatatctttctaactttttgcatctttagttaacagttgtgacattgctccttttttgattcccaacatgttatatttattcaactgcatatatatatcttctgaaatattagagtcattaagagtttttgattcaatctggccctactaattatgttttataaatgatcctcatatgtgctgaattcaaatgctctagaattaatagaaagtgttgagaatgagcgcctttattcattggatatatagtaaacattctcaatattgtattaaacagatttagtatacaaaattataataaagttcttcactttctttctctatatacaacataaaaataataatatacaaagattgtaaataagataaaaaaaatgtatgatgaaatccttggctttatatatgttaatattaagccattttcctctacgaacagtaagatatttaataaacaaactcaacaacctttggtgacctctcaacaattattactcaacaatttatcgtttagtgtctactaaaatcttattgttctatctatttcattatagaacattttatttcaacagaaagactaattagatcttagtaaacacaaagctatttcaaagtgcaaaataagtattgtttatttaactggtgacaaaacaaattgaaaagcttctaccacctgtagaaaagagttgcaagatataaaaataaaaaaagccaataattttttgtatcatgtttctatcctttgtagacttctatatatatatatcgcacatacaaaataagatcaaaaaactagaatatattttttgcaagttataaatatataataatgggaattgagattgtatactctgtaagaagctcttgttgaaaatcctcaagaaagttgcctgcaggtaacactaaatgttgaggtgaagaacttggaacagcagaaatgctgtattcaaggatgtgagtttgctcgaaccgacgaacgatcatcggatgagcattagtggcaaattactgagaagtttttttgagaggcctgtgattattaagagatggtgctagaaataattatcagcattaatagtcgtattctatctaataggtttcacctagatgataagaggaacaatactgttgaaaattagcgcctgtagttattgcgcatagaaagtaaaaattttcaatgttatattgatatatatagtgtacaaaattatagttaagtgtaaggaacctaactggaaatccaatagatacgcaattccgaggataacccctgagtgtctgggtggagaattggtacgtccatgtgcgcagtggctcgtagaaggtattgaatctgattggaggatttccagggagtgagaattatatcagatcttgtcaagaggcctttgattattgagagatatgccaggggtaatcatcttatttaagtacatcttagtaatgatattaagaggcaactcttaatattatacaagaacaacacgaagaagtaatacaacatcaggattattaattaataatatacatagcttatgtaagagtgtttatacttatactaattgatatgattcatccagttacatacaacaactcttacattaagtttttcagtttttatctttatatctaatatatagataataatgtataaaagacgaacatgggaagaaacatgatatgaaaaaaatgttggtttaatatatttttgtatctggcacatctcatttagatatagcaccaaatttaagatgagatttgtttgcgtttactgataagcaaacaatacattttccattttttgcttgtcaattaatgtttactaaaatctaattggtctattatttattctagaacgttcgattccagcagaaccatcttccataacctttttcttatagataatttatatattatatatatatacatattggaatttggagccttctgtgtccatggtaatggtagatatcattaagttatagatacttgtttttgtttttgtattaaatacctgtacatatttattatataatgtattcagtatacattcttttatttactttaagttttcttttaaagtttttcatttcttttcaaatcttcgaaagacatatttggtgaaaattaaaatgttttcctgatattatatacatccgtacaccacataatatatagaaaaactaattaaaaataattcttatgaaaatggcagtaataaactctcatttttcaacaatacataaatagaacaacaagacaagtaacttcaaataaatatatttagctcgatataagctgctcaatatataagaccgtattaataattgcattactgattgtatcaattattgtctcgattattaataaattatccgtttgatatttctagcgcttccccgaataatattagtagttattcaaataatcgagacagtaatcaactatagtcgataatataattactaaaatggtcttatatattgagcggctttaacaagctaatatatatattcgaaattacttcttgttacttgcttgttgttctattttgtttatatataatacataaatcatttacaagaaacggttatggaagatgatcttttttctccagaaaacgttgtccttttatatgttttctggagctcgatcgattattcagattagtacattaatgatctgactggttcaaaccctaaaatttattacattaattctctaatcatggtaattattatcctactctgcaacactctgttgtagaatagaatagttataaccatcaagattacataagatcctgaatgaatctagaaccaattagtgtattaataagccatacatgtgctacaacattagatgctgcataataaaaagattggattacataagatcttggcaaatctagaatttacctattgttttattaagtcccacgtgtattactaatcaccatgattagagaattgggatgcagttctaatccactaaattaatgtaataaattttaggattgaaccagtcagattattaatgtactaatttaatgtactaacctgaataatcgatcgagctccagaaaacatataaaaggacaacgttttctggagataaaagaccatcttccataaccgtttcttgtgaataatatatatattatatatcaacataaataaaaaaaacaagcaagtaacaagtcaagtaacttcgaataagtacattagctcgatataagccgcttaatatataagaccgttttagtaattatactatcgactatagttgattactgtctcgattatttgaattactattaatattatttgcgcttccctggaatacacaaagaacttcaccataccatactacaacacactctgttgtggaatagaatagttataaccatcaagattacataagatcctgaatgaatctagaaccaattagtgtattaataagccttacatgtgctacaacattagatgctgcataataaaaagattggattacataagatcttggcaaatctagaatttacctattgttttattaagtcccacgtgtattactaatcaccatgattagagaattgggatgcagttctaatccagtagtgcacctaaattaatataataaattttagggtttgaatcagtcaagtcattaatgtagtaatctgaataatcgatcgagctccagaaaacatataaaaggacaacgttttcaggagataaaagatcatcttccataaccgtttcttgtaaataatttatatattatatatgaacaaaaggagaataacaagcaagtaacaaatcaagtaacttcgaataagtacattagctcgatataagccgcttaatatataagaccgttttagtaattatactatcgactatagttgattactgtctcgattatttgaattactattaatattatttgcgcttccctggaatacacaaagaacttcaccacaccatactacaacaactggtagcgtttatttcatcatgtcctcgaataatttaaatatgaacgaatttttagacgctattgatgcatctacggctacagaacatcataccaccgcaccaaccactactcctgctccaactactaacctaaccgctgaccctacttctgctcctgctccagtcccatccgattccaaatactacagtactgctccaatgcgcttctctggtcgctatgatttatttaaactaccagatttccttgttactgtcgaagcacaactttatgctcgaaacctccaaacagatgtggatcgtatagctttttttggccgaaacttaactggacccgctgctcaatggtatgtccaatggatccgtaatcatgaccaacattcctatgaacaattccttgtggattttaaaaataagtttattggtatgatcgaccctcatgccatcctcaatgcgttccaacgcttgaaggaagctaccgttggcattgacgcttataatcaaaagttttcacaactattagctttgatgccttcaaacatttggactcccaagggagaattacttttttattatcgcggtcttactcctgatactgcccgtatggtagctctagctcgccctaccactgttgatgctgctatggaagctgccagtgaaacagtttccatcaccaaccgttcatttcctaccttcaccacctatgatatggatggagacatccatatgaccgctgctcttaacccagtccctatggactctactactgatcatcatcctcaagttgctgctgtttatcgttcacacggaagagggggcagaaagggaaatcacaaatcttcccaagcaaacaaacaaccaattaagcgtccctctcgtcaatattgtattgatcatggtttatgtttctattgttacaagccattacaccgctacagtgactgccctaaccgtaaggcgagcagtcccaaatgaaaaacaattctacaacaaaaccgtcacactagctcccatcgtgtccgctccccatccactcgtaggcaacagttgccaaattaaaatgtttattaaagaaaaacctgtcaatgttttagtggatactggttcccccacatcatttattagagccgatattgctgacaacctcaagttaacacgttctaccgctccgccattccgttttagaggtgttgtatcatccgaatcgtcatacactaacgaatccaccgaaattttacttgaactcgatgacataaaaattaaaacacccgtatacataactgatgctattacttttgaaatcataataggacacccgattatatcatctcacccgctgctccacaagatattaaataacaagaaaccggtccctgaatacattgtatccgtacttaccgagaatgataccgaagaattagatgttgaaaatgctgctgctgtgtttgctataaagatttctgaaacagatacagatgatcgatttgataaactacctcgctggttaaaagagaaatattctgctacagtccgcgatgatttaccacctaagaaattcgctgaacctccaaaggttgaacacgagatcgaaattaagccgggtgcacgcctgcctagaagacagccatatcagacgacaccaaaaatagaacaagagataaacctgatcgttgccgaccttctcgaaaagaaattcattgtaccctccaagtcaccctgtagttcaccagtggttctagttaaaaagaaagatggtacatatcgtttatgtgtggactacagagctctaaatactgtgacaatcaaagacccgtttccattacctagaatcgacaacctattggccaagattggctcttcaaccattttttcaactttggacctccactcagggtatcaccaaatacctatgaaaatggacgatcgtttcaaaaccgcttttgttactcctaatggaaagtatgaatataccgtcatgccgtttggtctcgttaatgctccaagcacgtttgctcgttatatggctgatttatttagggacttaccatatgtctgtgtttacctcgacgatattttaattcactcccgttccgttgatgaacattggaaacatatagacatcgtattgcaaaggttaactcaagaaggattaattgtaaaaaagaaaaaatgtaactttgccgctaaatctgttgaatttttgggatacactatctctgctaataaaatccaaccgttgatctcgaaatgtgcagctatagaacaatttcccactcccagaacaattaaagaagctcaaagatttttgggtatgataaactattatagacgctttataccccgctgctctcacatccaacaaccgattcaggattacatacatggtaaaagtaagtggtcgacggatcaagatgagagctttaacacattaaagtcacacctaatctcaaacccaatattagtctcctttaaacacgatggtcattacagattaacaaccgacgcttcaaagaatggattaggtgctgtactcgaagaagtgaatgagcaaggaaaaattctcggggtcgtgggttatttttcaaaaactttacaaggcgctcaaaaaaattactctgctggagatcttgaactcctagccattgtcgaagccttatcacattttaaatatatgcttcatggcatgcattttatattgagaacagaccatattagtttactaacggcacaaaagaacaaagaaccctctcgtagagtaattaaatggttaaatgaattagccgaatatgattttaaactagaatacttagcaggtccaaagaatgtagtagctgatgctatttccagagcagattacaatattgctgctattgaagatgctgccgtcacattagatccgaaaaattggtacgaagaatacctagctgacccattatgtgctgcctgttttgtttatattaccaaacttgatacaaaagacttacccatttgcaactcatcattgttcaagaaatatatgaagaaattgaacttatcaagaacctttcgccattgttttacaattaatgacaatattatttactttaaagaacgctatgttgttcccaacgctaaacgaaatgaagtccttcgaatatatcacgaccatggcctttatggtggtcatttcggttcaaccgttacatacaataaaattgcaagtcgttattattggccaaaattacaccactctgttaatgaatatgtctcttcctgtatacaatgccagttgattaaatctcatcgccctaatagacagggcttattgatgccttctgaagttcccgaaggtcgatggttaaatattagcatagattttgtatctggtttacctaaatcagaacaaggtaacgacatgattatggttgtagtcgacatgttttcaaaaagaactcacttaattgctggtagttacccatttgatactacttccgttattaatgctttattccgttatattttcgcttaccatggatttccatattccattacttcagatagagatcctcgttttacctctacagaataccaagaaatggcaaaaaggttgaatataaaattgaaaatgtccacagcaaatcacccacaaacagatggtcaaactgaacgtacaatacagatccttaataggttattaaagacttatactggtaacaatcatagacaatgggatcgtttacttcctcacatcgaattcgtctataactctactcccaatcgcgtaaccaagacagctccttttgaagtagatattggatacatccctaatgaaccaatcatagttacaggagatgctgtttcttcccgtcatgattcaacacaagaactagccacaaagttgaaagcacttactttacgcacaaaagatttcttaactgagaatcagatcaacatggaagttacacataacaaagggaggaaggaagttacctttgaaattggtgattttgtactgctacatcgtgatgcttattttaagagaggtcaatatctaaagctacaacccatatacgttggcccatttaaggtagttaagaaaataaatgacaatgcttacgaattagatttaccttcgatgaaaaagactcacagagttattaatgttgaaaaactaaaaccgttaaaacgtagaaaagaccgctatccaaaagatccgcctaatactgctgccgaaaggaaattaagagtacatgaaattattaatgtagtcggttacgataaagataacaaagtgttttattgtcatatggaagatgttgatccgactattacagtagaatatccagtagaagaatttaacttactcccaacaaatattggtcaatctttaattgacaatttcgtacaattatggaaacaaggttcccaagagagagaggaagatgttgtggaatagaatagttataaccatcaagattacataagatcctgaatgaatctagaaccaattagtgtattaataagccttacatgtgctacaacattagatgctgcataataaaaagattggattacataagatcttggcaaatctagaatttacctattgttttattaagtcccacgtgtattactaatcaccatgattagagaattgggatgcagttctaatccagtagtgcacctaaattaatataataaattttagggtttgaatcagtcaagtcattaatgtagtaatctgaataatcgatcgagctccagaaaacatataaaaggacaacgttttcaggagataaaagatcatcttccataaccgtttcttgtaaataatttatatattatatatgaacaaaaggagaataacaagcaagtaacaaatcaagtaacttcgaataagtacattagctcgatataagccgcttaatatataagaccgttttagtaattatactatcgactatagttgattactgtctcgattatttgaattactattaatattatttgcgcttccctggaatacacaaagaacttcaccacaccatactacaacacactccatcgctggagttggttccttggcccagttggttaaggcaccgtgctaataacgcggggatcagcggttcgatcccgctaggaaccattctttttgtaatgtgctgttgtgcagtgtgtaatatctctgacattactatttagggtttcgtttagaaaaatgaggtttaatgtaacatatgaaatctcgatgtcactataaacgatcttgtgaactcctttagtcgacgataacgcttttgtttttcttgcttatcttgtttatataactgtaatatccttgatattactgtttagggtttgtttagaaaaatgagggttgacgatatttttctaaactttcctttttgcaaattttacaaacatagataaaaacaggagtaaccaacataagtacaagagagcagccaaaaacgaagaataaagaacaaggcaccaaggattgcataagcttagatatatagtatataagtgtatactattaggttatcttagattaggggtatagatatatagatatataggaatactacatctagagatatagaaagagtctatatcttatatctatctaagtgaaatattattgagatttcgacaagattaactgttatcagaaacacataacctaagagttgttacaataactatgtttatctgtatatctgtgtatattagtttactctttatgtagagtatagtttatatgtcatatatagacaacaatttaagctgtttctatctatttagcgtctagaagagtatatctctcgtaatcgcttcatctattacagtttacggtgtttctctaaattttcctttttgcaaaattttacaaaaatacataaaagcaagagtaaccaacataagtacaagaaagcaaccaagaagaacaccaaggaacaatgaacattacagtactattcctgatattataatatttttatgatgtataatagatgaaaattctattacgaaagatatgctcttctagacactaaaatagataaatatggcttacttagttgtctatatatgatatacaaactatattttgcgcaaggagtaaactaacatacgcagatatacagataaacatagttaaacaaacaagataaacaaaagcgtcgtcatcgactaaagaattcacgagatcgtttatagtgacatcgagatttcatatgtcacatgatgtgtgaattttcaatatataacagaatttagagagattaccttaagaggaattgcacaacatcatatagatagttgagaaagaactatcacaggcatatttttttacaagtattaactattcacctgtgatataatgattttcatagttttaatcttctggcattatgtatttttatatatattttttaaaactaaatcggatttttcattagcaattcatttcaagaatgaatcttttgaaatacgtttcaaatcaacaattttgttcttgctttgctatatattaatatatatcatatagaaactttctgaatttgaaggtttctttgctcagtcggttaatgtgccgtgtaatgtctgattctactgtaaactgtaaggactttatataacttcacctattgaaatttattaaatttagttttaaaatttcaatgtctgcttttctcaaaagaaatatttctctagtataaatactttacctcattaatggtaaaaattaagataatactaaattatgaatgaccaatattcaaaatatattatgtatgcttaaaaatatctagagttgaattaatcaactaatatagtaaactacacatagtatattgcggacattcggagaaaaatcgtggctttttaaattttttgcgtaacacttatttcacttaataaccatttcactagaataggaaaaaaataaagtataattttttctgattgtgctatgaacagcaattttagtgtataactaaattaaataaattaaatcttaaatcataccaaaaatagtttagatatcttatttattaaacaatctaccacatgtataatataaaaatttggaaaacaatgtatttatttattgaaactttttagtccttattattactaaacatggatgcttatctctctctttcgtttttctattcatggtatcttcttataatatgccgttgaatagattcataatcaacggatagcaatcagtgaggatacgtcatttaaattaatgttaccaaatttttttatcccattttaatgtttgtgctagtgattaatagccatagctctgttatatatgaggaaagtatacttacttctcctcattaaatttagattatttttacttttcatagaatgtaaaaatgatttatcaataaaagtaactacactatatacaaaaaagcactaatgcattatatacaatacacgtatactatatgagtgagttggttatttctaatctattaagtagtgtgattacaatgctttcaacccttgaaaacaatatcttctaacagtattacaccaaaattttattaacttcgcaagtatctattttttagctttcttcttaaataagccaaatttctttttcttacttttgccactctcaacactctgagatgtattattgctagtaaatgaagctggtgatgattctacaacattagacacacttggtggtaatgaaggtgtcttcaattggattggtacactagaagactgttgggtatgtagttcgttttggttatgttgaggacttggctcctgttgttgtttttgaaaattaggtattactttaacattagaagtcgttccaacaggacgaagttgagtttgcactactgagttcatagaaacattcccaagattatccacgtccgcagaggaagtactaatttgccgttgttgcaattgttgttgattaaaattagctggaacatgttgcaatgtattcgcacgcactgtggagttcaaattattgaatgatgcactatggatattttgttgcggctgttgttgcgtatttctcatacgtgtttgaaaattcatgctctgacttgataatgagtttaatctactttgactattaacagaagggggagcattatttatcatattgttttggaaggcgtttatattagtacttgaaggattacggagatttagcatattacttgctctgtttttcctacttgttggtttgatcgtgtgtaaaaatggttgttgctgttgctgttgcgattgtgcttgttgtggttgtatcaaattaccactgtatgccatacctgatgaaatcggttcattaaaattaagtgcggaaacagaagcagagctagctccatatatacctctactttgacgcatgttagatatgtgagtttgttgtgggacttgattcaatggttgatttctggaaataatttgattacttgtttgaggaggtaactgactattagacataatcatattatgttttctaccggcatattgttgctgttgtagtgctcttctttgtaactctaactcacgttcctgtagctctaattcttttctttttaaatctaattcacgttcttgtaaggttctactttcttccatcttatttagtgatgtacttgattcaccaccatttgcatttatattttgtgaggaagaaataacattagaacttatggattgttgttgttgttgctgctcctgctggtcgttatttttagaagtattcatgtttcttatcggggaatcaccatatgaaacaccaaaaatagccatatcttgtaaatcattcaaatttggagtaccagtagctttatacccatttgaaaagttttgtgcattttccaaattcctattaacaactttgtttccatcaccatgacccatattactattactattatcattgttattcgttgtaacaacctttttgttattaatacttggattgttgtcattcacaccttggttcaaacctaattcatttatttgataatttagtttctgaatctgggactcataattattaacagttataatatgatccttattaattaatttcaactgctctctcaattgttctatgctaacattattttcatttatttgattattcttggatttcaaattttctttcaattgacttatctctttttctaacgtgttatttttaatctttaaatcattaataatttcatcacttttgttgtttttagattctttaatattagttgaatttcttgtaaaccatttagattcaccattattaatcttttgaatttgtgacatcatagaatataaaaattccaaatatggggttttaatattttgatcatctgcaagtaatataatttgtaaccaaattaaatcaatattcaatggagatgttttattgataaaattatatactaatggtggcatctcatctgaatataatgattgccaatagttcaagagattggattcgctattcattgaaggatttaactctatacccattttattaattaaagtaatcacttcagagactaaaccagatatcaaaggtttagctaaaatcaaattaggtaaattttgagggttagcttcttctaacataattaaaagtggatcaaaacatatttgtgttaaagatagctcccattgaacttttaagaattgtttagaagaaaagttgcataaatttattgattcctttgggaatagttttttaaataatctttcaaaagtattcaataaattttgtgttgtggaactataatttttagaactgctgtcacctaaataaattgtattttgtttgccttttgcaccaaattgtttgaatacatttattcttttatcagtatcaacagatttaatatgacgaatttcaaaatctgatataatacttaatacattaatcttatgattagaattaatggacattctaacaaatggttccaattggacacttcctgtactttcaacaaatatttttgtactattagttattaaaggtaataattgagaagaaatcgtagatagttgttgtaaagagatggcactaagaataattaaatcaaaaagcacatttttgtttgtattttgaattaattgatttattgaattgaaatgatttgttaattggaatgtttctaaaccataggaataactctcgatttcatattgattcgaatctaaatcactaacgtgataaagatctacactatcggccaattggaatctagatgctaataatataatattagggttatcaccaactagaagaacttttaaagaagccatcatttaatatgtctgatctcttctttctcctttttattttgattttcttacttctatgataaaataatattcttaaatatatagatatgtctatgcaaacaaaaggatgagacaatgtatttatcttggttttatgcaaaatggaaacaaaaaaaaaagtgaaagaaaaagaaagaaatctaaaactatttatcaaatattaaaattattctattttggtaataaaagatattaccagtctatttccttatttttttttatttcaattatccttattcagtgaaaagaggtttctttttttcttaattcgatactttttttttaccaatgatactgggaagcaaaaaaaaatatgaataggaaatagtgtctagcaaagtagtacaaaaatagtcttggttgttgcaaaatcctgcaaaaaaaaagaaaccaaaaaacaaaaatatgaggagaaactagtactagctttgttattctcttaataaaattgatcgatctaatacgaagagttttgtccgacaacgacgaagttcaatgtgtaagaaaaaaaaaataagaacaaaaaataaaataagagcatttctctaaacattcaataacatcaacagtgataccaaggagcctagttttaacgtcggcatataatagaggatacaaaaggaggacattactaaaaagttgtttccttccaccctcgagcaaaaaaaaaaaagcgacgcctcgaaatctcgaaaaactgtctgctttttcttttttttttatttttatcttttttttttcttattctctgtcagattgacgaaaaaaaaaaaaaattcaaaaaaaaacaaagcagaaatagtgtctttgatttgaggcttaaagggaaaaaaagatagacaaatatcgtcctttagttacagccttttatcacaaatttaaacgcgtaaaggctgcaatttgtagaaacagaaaattttgctcgtctttgccttccttttatgtcattttccgtgcatattccgttacggaaattgtttcacaactgttttcgcccaaatctctttttccattatttttgtattaactccccgctttttcattactattattattcctattatctttttttttttgggttggactgatgcaagaagtcggggcagttaaaaggaagaagacgttttctttcaagaagcctcaagcatacatctcaacatttttacaaagagtgtaagtatgtaatcgtggagctactgttgtatgcatgcaacaacagagacataatattggcaaaattgtttgtttctttttttcttttttttcttttttctatctaggtgaattcttctaattttgatattgctaataatcgataatatatcttggtaatgttcaagtattataactgttttcttttttcttttatatattccaaccaaacagccctcttgtaagtaaataaatataaatatgtacatatatatatatatatatattaataccctatagtaatatattagcaatcgttgatatggactgatagtagtgtgcgtttgctcacacatctctgtctccttatgtccgttgcctttaaagaaaaaaatttgtttgaagaaatcaaaattttgtgggaattttcttttgtttttttttataaaaaaatcttttctattatatggaacgttgctttaattttaacaaaaaacaaaggtttctttttccctaaaatggcattttgatctacatccgaagtttttcataagaaaaataccgctctgatctttttaatagtattaacaagtccttatatacagcaaacgtattcatatatatgaatacatttcaaagcttagataaaaataaccttgcctaacttatttagatagctttaaaagtaaatacaatagatgaaaaacattactcatattttcctttttttgttttcaataaacaatagaaaggaacatttcttgtactttttcttaattttttgctgtattccccacttcgtttgaagcattcctgtagttactgaggttactaaataaaataatgaattcattttaacaatttagagttcttacatattctattattattattataaacaacctattctctttttttacttttttatttgaagttttttgtgttagtagttaagtctaatgttggattcaattttcattattttttttttcttcaaatattcaacatagattcatttatttttggttttacttttttctataattcactgtgttcttaacccatagtagaatatatatacttcattttcagacattctccactttctctttaatgtgattaatatttataggtaaaaataaaaatcactttttttgtattcaataaatgtatgtttaaaaaaaaggaatcaagttttagtaaatagtattatatcaatctatttacataaatagaagtgaagtgtatcgagtttatataatatttttctttttgtttttttattttttttctctctatgatttcatggaagtctctatttgcatactaactgtcttgagcccagtttctcctaaaacgagcaagcgggttttagtatatatatgttgaaatagaatgttctataataaaatagatagaacaataagattttagcagacactaaatgataaattgttgagtaataattgttgagaggtcatcaaaggttgttgagtttgtttattaaatatcttactgttcgtagaggaaaatggcttaatgttaacatatataaagccaaggatttcatcatacattatttttatcttatttacaatctttgtatattattatttctatgttgtatatagagaaagaaagtgaagaactttattataattttgtatactaaatctgtttaatataatattgagaatgtttactatatatccaatgaataaaggcgctcattctcaacaatataatgctccatttacaagttctttctgttgaaatagaatgttttatgataaaatagatagaacaataagattttagcagacactaaacgataaattgttgagtaataattgttgagaggtcaccaaaagttgttgagtttatttattaaatatcttactgttcgtagaggaaaatggctgaatattaacatatataaagccaaggatttcatcatacattatttttatcttatttacaatctttctatattattatttctatgttgtatataaagaaagaaagtgaagaactttattataattttgtatactaaatctgtttaatataatattgagaatgtttactatatatccaatgaataaaggcgctcattctcaacatggtagctttctgtctggacacactagtgatcctagtgctgtaaatccctccacgggcgctggtattaaagcttttaacataaataccagtcaagacgcttccactgcatccaacatcccatccaaccctcagttggaacataatttaaatgctacaacagatgttgacccatcttctagggaatctggaaacaatgcttctccagatcagcaatctgctccatacggttcttccacgccgaacaatccttctcaggctggaaagtcatcctatcctgattctggtactaatggtccatcatatgaccatcatattccaataaacggttaccaacaaccaactggtttcgcttatatgccatttccttattatggtcaactaccgggatattattctcccatcaatccaatccaaccaatgtttccaggttcacctaaccattcatgtacatataacaacccatacattccaactactttattttactgctctagtgttggtctatttaactcctgggttcattccttaataaaacatttgattgcttctggtctaaaagatttggttcctgattcacacgatcgtactgtaagagatccaacgccagaagaatctcaaggtttaattaatttatttttcacccttgttcctcagagcagttatcccgattgggttcaagaatgctttcacaagcaaatgcatccctatgatgttattcgtcaggccatgacatacgacattgaacgcagtaatgtcaataccattatcaacactattagatctttaaaatataatggtggctacccagcatttcaatttacaagttatctccataacttaattgatcaattgaaccccacggatcttcaaacccacgagtacctgctaaaacaaacaattcttgatacgttaacaggtacttacgaatccatttctaaacacttttttaagagtgataccccatatactataaacgacattttctcttctatcaagagagaatatcaatactaccatcaagcttcacaaatttccgatccacatttttcccctaatcctccatcttcttcaaaaaaacagtatccaacaaatccatcagtgaataaacgagcaaacaacacatctactgtgttgaacaccaaaaatactacagttccttcaacagttaagccaaaagccaaatctaccaaagctcgttctaaaaaggttagccaagttaaaacccattcaaatagcacctctattcctcaacaaaataacccagtcgatccaaccttacttaggcctatttcaacttcactaaatcctgcatattatatgatgctagattccggtgctacggttacccttgtaaaacataaagagatgttgcacaatcttcgtgactctcatcctgaatctgttcaaataacctcatgctccaacacggatatcccatacgatcaagagggtgatttaattctaaaaacattaaatggcagccaaataaaaattcatgccttttacacacccacaattgatcacaccattttatctactagtgatctccgttctcaccatctgtttttaaacgagcgtctcaacaccattgaagatgctaatggtgatgttgcagcaaacattgactcctcaaatggtttacattggttatccaatcatcatattgtatttccatctactgcaactcgtaaatctgtaaatgcgttaaaaactaaatttcctttagacatgattcatcgcattttaggtcacgtcaatgttcagtcaatctatacatccatcaaaaataaaaccttcaataatctatctatagacgaaattgattggtctaaccttaacaattttcagtgtcaggactgtctcaaaggaaaaagcaggaagagaccacatattgttggttcacgtctgcaataccagcaggtgttcaaaccatttcaatatattcattctgacctgtttggaccagtaactgtggctacaaaacctgaatggtttatatcgttcactgatgaggcatctaagtttaagtggacttatttactaaaaaggaaagatgatgcaacgatcctacatgtcctcaagtcctttattgcgactattgagcgacaattcaaaacccccatattaaaattccagtttgaccggggaacagagtacaccaactctgcagtaaaaacgtttctttctgaaaacggtattcaaattgtttataccgacgcaggtgattcccaagctcacggtgttgcggaacgattaaatttaacattattaaatgattgtcgtactattatgaatagtgcaaaactcccacaccacctatggtattacgctgtgcaatatgcaactataatccgtaattccatatataacaattctatgagggattcacctcggtctaaagtcggtttactaggacttgataccaagtcactgctaccattcggtcaaccggtcattattaacctcaataaaactgcctccaaattacatgtcagaggtgaaaaaggttttgctctaataccagatgctgaatcttatggctatttattttacctcccaactaaacgtagggtggtatcctcatccaattttgttccaattaaacatgacgtcgatattcatgaaaatgaagaatatgatgattctatattcgacgatctcatcacaacttttatatcaaaatttgaacatactacatcttcaaaggacgaaattgaagccacaccttctgataatcataaagatacagttttatctactctatcctcatcacccaaatcatcttccctcgttaacaaagatccactctttgaagataaaattttaattcaaaatgatgctgatgctgatttgaatatcaccaccaatactacttccaattcaaatccatctaacaaccacactactcatcccacctcttctgatttagaggaactaatcactcccatcgacatcaatgatcctaatcaactacccttaactcttgttgaaccttcatctcatcctacttctgatgaatcatcaccactgcccactgctgtctctactgatactacatcttcatctacaccaccatctagtaatcgttcatcaaaactcacccccattcctactgataatttctacgttgacaatagtaccttgggtggtacaagatctggtaatcgtcaaaagaacaccaatgtagaaacgcctgaacctgtcgatgccaaagaacggcagaagcgagacagggacgaaagaactaaggcacgtattggtaaacgtaggaaaactacaaaaacatatgcagtaaattacattgctgctacacgccacaccataaaccaggtcagcagtgaagagaacaaccagcatggtccattacaatattttcaagcaatcacacacaatagggatccaattgaaaaagaaaaattccaagaagcatatgataaagagatatctcagctgacgaaaatgggtacctggtcggtaaaaactattgaagctacagaagtagacaaatccaaaattattaactctatgtttatttttagtgtcaagcgagatggtcatcacaaatgcaggttagttgctaggggagaccaacaaaaagcttcgacttatcaaccagatctgatgtcaaacactgttcaccattacgctctaatgtcctgtctatcaatagctttacaaaacaactatgatattatacaattagatatatcatctgcttacttgtatgctccattggaagaagaactgtacattcgttctccaccccatttaggattacgaaatacagtacatagactaaagaaatcactttacggtttgaaacagtctggtgcaaactggtataagaagataaccaattttattattaatagttgtcatatgaattttgtaccaggatggccttgtgtattttataaaaaaatcaatgattcaatcgtgatattatgtctttttgtcgatgatatggtattattaactaataatcgtcaactaataaatgaccttatttctcaactccaatcacagttcgaaaccaaagttgtcaatgacggtgctcaaaagattaatcaatatgatgttctcggtctggaaatagaatatattaaaggattatccatgaaaatgggtatggctaaatctttagaagaaaaactaccgaatctacgtgtagaccttaacaaaagtagaaaagtcccaggaacacctaatgaaattataagagaaagggaattttatccgactgagcaggagtacaagaataaggtgaaatggctacaaaaagcaatcggtttagcttcatatgtcggttacaagtacagatatgatatattatattatgtcaacacgctagctagacatactctatatccatcaaaacaagtcatgagtctaaccaaacaactaattcagtttatttggtcaacaaggaacaaacggctcatatggcacaagacgtccaactccaacattaactatttaactgctgtaactgatgctgcttttgcaaatcaacacgatatgaaatcacaatttggaaatatgtattatctaaatggaaatttgattggtgctaggtcatctaagtcaacaattacatgcacctcttctaccgaaagtgaaatttattcaatttgtgaagcaattccaagattaagaaatttaaatgttctaattcaggctatatcagacaaggaggtcaggtgttcaatattaactgacagtcaaactagtctccatcaaatcaaagtaagagacatatcaaaaatcaagaataaattttatggtactaaggttttacgcattgctgaagaaattgaaaatgataatatatcagtgaattatattaacacaagtcaaaacgttgctgatattcttacaaaacctttgagtgttaaaatttttgccaagttaactgagaattggatctactaaaattgaattgatctatgggtggtatgttgaaatagaatgttttatgataaaatagatagaacaataagattttagcagacactaaacgataaattgttgagtaataattgttgagaggtcaccaaaagttgttgagtttatttattaaatatcttactgttcgtagaggaaaatggctgaatattaacatatataaagccaaggatttcatcatacattatttttatcttatttacaatctttctatattattatttctatgttgtatataaagaaagaaagtgaagaactttattataattttgtatactaaatctgtttaatataatattgagaatgtttactatatatccaatgaataaaggcgctcattctcaacactttctattcaaaaatttgaaatatctaatttttgagttttatattttttattattattaagtatttaaaaaattgtcagagataatcatttgttaaataatttattgattcttcactactatttttgtagagtccgtattaaaagaatttagttttaaaagttgtaacgtgcaatatatatatatatattaagataagtatcccttggacaacaagctttcatattttagaaatattactaaacattacttgtaatatctaaaataagtgttttttagtaaatactaataaatttctaaaaatgattttaagcaacctcctatataaaatttgttttctcttcaattgatagatacccagtacatagaaagttccataattggagcagaataatagacaaaagattaaaacaataactactactttaattagttcttttctcctttcatagccactatcttattttctcaaaaaaaaaataaaaactttcatttttatttgtttaccatttttcatatctatggtcaatcaaaatgcaatattttctgttgaatcaaaatttctttaacagtagataattcctaaaagactaacttccttcttcacagtttaaatatctcgaagaatattgaaataataaaacatcacttttttctctctctttctctttgagatacaacaatacaaaaacctgcaagaaaaaaacaatacccgcatatgcaacttaaattcaaaaggacaatatccgcctttgatcattatatacgggctgttactaagaaaggatacaaaaaaaaaagaaaaaaaaataaataaaatcttcatagtttttgtgtgaaaaattttgtgttctttttttttctttttttcgttttaggtaattcccgatttttccgttatatcatcacaaacgaaaaaatcctcagacggctaaataaaataatactaaatatatctgatatttttaaaatccttcaagatggtctatcatcgcagtgcctattagacaaatagcactattccacctactttaattacaactgacctagagaaaaaagttaacatacaatattataagataagcaatgacaatacccaatgtggtagcaaacggaactgttaaaaaagttaaaagaagaagaaaaccaattaaatcatgtacgttttgtcgtcaaagaaaattaaagtgtgatcagaggaaacctgtttgttcttcatgtaaatcaagaaatttgtacgactgcacttatcctgcaataagttcgtttacaccagaaaaaatcgcaaattgtattgaaattattaacccttcaaataatgctgatgaaaacaataataatatatcatctttaccatcaagctccatgaatactaatgaattactatcaaaggttcaatttttggaacaacaaatttttgaaatgaaacataattctattgataatcaaattctcaaaacagatgtatcttcccctgtaatgccaaatgaacaaataagaaatgaaaatcagtctccaaatttaactataaataacaacaatgatagtacccataatatcaattatagcaataatgaaaatatattccaaaattttgaccaacatttgcctaatccattaaatgattattattttttacaatgtaaaacatctggaaggagaattgtctatggtccaacatctatgagaacaagtttacataaacattggtcaggatttgctcacaaatttaatcaattatgggtcaaaataaagtttgaaagaaataaatggaaaaaatcacgtaacatttcaaatttgaatgaattaaaatacattgaacaacaaaacgatacccaattcagttctttattagaaagattatgtcatgatctacccccttacaataaatgtcttgaaattataaagaatttttttgatccatcatatgaccatttacgtttagtcaattcaactttagatagatacaaagtggttaacgatttttatacatattttgttcctgattcagagaatcttctaccgaatggagataagccaatcaaaaatttacttgcaggtagcaagaaaaattattacaaagtcgctgtcattattcaaatcataacattacaatatttttaccaatcttgtcctgaatcaatagatatattttctttatatctacttggacaagtgtcaccgaaagtatttttcattgaaagattacaattcatgttattacgttgttattatctaaagacatatgtatccgattgtgacagttcaaatgccatcaatattattagcaatatggtttctactgccataacaatggggctagatagagatatcaacacaatttataaggaccaagaacatgtactagggaaccttaaatccatacataatctgtggaaaatgatcgttttcttggaccttgaatgctcgttccaagttggcaaaccattgctacttcatgaaatcgatctagattatctagattacaatgatatattatgtgaagatcctcattcaactagaataatgagaatgacaaagatggggaggcaaatattaaagtgtctgaattctaaaaaaggcacaccgaaatttcaagctttagtggaacatattataaacttcatggaaaaagaattacctcctatatcgttttttgtgaatgctgaaaaactagcagaggtcagttttagtgatatgagagtggcaagcttttgtttagagttgatattatgtttaaattctttaaactccgctcttaaaaaaagtgtaaacatcgaacttagagataaagctattcacatgtctttgatagcttttcacatgttagaagctgtaacaaatagatgctttcaactagataaagagcgattctcagaaatgttaacacatgtttcatggaatctgaccccatatttctcacaagctatttggtttgctaccggattattacctagagcgtcaaccattttctgttctattctttactatagattaaccgtctttacaaataatgatttcttattctacaatcaaaagcataccacttggaatcccaatactctaagaattggaaacacaggaataccggtactggatgctttcgatatatatagtaaactcattgacaaatggctatacccaaataatccattaaaaaagcaaataatggataattcgtatttttttatggtgactaatactttacaattaacatttagaaaagtattaataaaatgtatggagtatagaaaaattactgaagttacttggatttctcaattaaacaattcaattcaatccaatccagacacttgtttaaatgattctaaaacaaaaaatctgcaggagatgctagatgaaaacctaataaaaaatgaatctactgcaaaaggtgtatgcccgatttccatgatcatgaattctcaacaaattcaaatgaagactgacgaaaataattgtcctaaaaaccaagaattttacgggtcaatagacaatcatacagacttcccaaaaaaagatccaagaaggatacgtaacgactttactacatattcaggtccagtatcacccaattacagcgatgatgggaaaagcataacaaaaaatattgaaaacgaaagtaaaaaattgattgatgaaaaagaatctgctatgttacaacagataactgatgagttttggtcaaattacaacacaggttgggaagaattattgaaacaaacagatgttcacgaattatttgaccattatctctaaataatacatttatttacacttttagtagaaatatttatctaaaatatacataactacgttactagaaaattaattattcttcatcttattgtttatagcaccaagtcagcatgattaagattttatattttacacatgaaggtattttgttttaaaatgtatgtttctattagtaaagcgaatatgttattaatgcagccacattcttacctatacagaataacaaactacattcacagtctttttttgaacacagacaatatgaaccaaactttttgattctcatctataaagtagttaaaagattatgttaaataacttttatatttttatattctttgaaatttttataaaattgtaaataatgatacctacttatgcaactttcacgtataatatttatgcttttctttgggaattattttatttagtaaataattacttgtgaaatttttgtattgaattattttttttcttaagcccagtttgtaggaaattcgcaaaatccaaaatattttactttaaatgtgactttgacatttctttataaaacaatattaatttgacttgtacaaaaaaaaaaaaagaaatacatgtttcatcaaataaaaaaatatcttttcatgatatcttttcctacaatgctttcatagtacaagaacttagactgatttaaatattgaccaaataattattatctatatttagctaatatgtcatcagagtttaaaagaaggaaaacaattagatcctgtttattctgtaggaaaagaaaattgaaatgtgaccaagagaaacccgtttgttcaagctgtaaagttagaaaccaaacttgcacgtatgttgacactacaaagtctactgataattcacccctgttaactcaacaaccatcaccaccacaactgcaccatttgacaaatgaaacacaagcaattccacacgttacaaccaatatacttatgaatgaaattaacaatctacagagacaagtacagcaactgagcagtcagattaatagtattagtgaagctcgaatgaacgttatcaaaactacaaggactaatatcaaagaatcaattaatcctctgtacgaatttacatatttacaagtaaaaaattcagggagtagaatactttacggacccacctccatgagaacatatgttattaaagataaatggggttttggtaaaaaattccatcaattaatgattaaacatagatcagaaaaacatgaagaaaattataaaaaaaataaactgtctaatagaatattatctgaacaactagcatattcacctaattatggacaggataacttatttttggaaatatgtaatgatctcccaacacacgaagagtgctcctccatattaaatagattttttgatgacaaaaatgatgacatatatccaatgaatcatatattagacagacaccatgttattgacgattatttttcaagacattttattgataacttcaataatcttggcagtgacaaatctcatttaatattagcatcttcagaacaaattgattactataaaattgcagtagtgttaatgatcttttgtattgctcattataaaaataatattccaaaatcaatactacaatttataacacgagttacaggcttagttggttcgaaaatttattatattgaaagattgcaattctttgcactacgttgtgaatatcaactatatgttaatacagatggtgataattccaatttagttaatttgataaacattacctcagaaatagcgatccgaatgggtttaaatagagatatcagaaagctttatgctggtcaggagaatattgtaggaacattagactctttggaaaatttatggttgcatattttatttttggatttagaatcttctttccatataggaaaaccactgtctatagtagctgcttggttgaatgaagatgctattgtagaacatgatttatattctagttataagattaaattaataaaatttttaaaacttgcaaggacaatgatgtctactatcacaaatccaacaggacaaccaaatctacaaaaatattgtattgatttatttaattttattaaaaatgaattaccatcattacaaatgtttacagaggaaataaaatttcaatctgttcaatttagagatgttagattattctcgattgctttacagatgtttctttcctttgtttcattacggtttgcagtttacaatgagaggtcaatacttttgagagatgttggaatacagtcttgtcttattttattaaaaatgaacattctccttttgaagaagtgttttaagttagatgaagaatatcatcctaatagtttttctgaaacagaaacatcgttatcaccatatctttgtttaatgttatatttaactaatggtttacttcctagagtagcatctgtattctgtccattattataccataaaataagtcggtttaatgacgattccttggctaaagacacagaacataccaatacagaatgggacttttctgtgctatctatcacgtccgaaagacaactttctttaattaaggcatatgatgtgtattgcgaacttattgcacatattgctgacccagtaagtttcaaattaaaaaaaattttagaaaggtcccattacatacatgttgtgttggttatagaaaaactttacagaactatcattcaaaagacattagaatttcgtagccaagtggagtcatcctggattgataaagatatcgaactggttccattagctcatcccagaaacttcaagaaaagtactccaaaagaaatcgaggagaataaagctccctttacaacagaaagctttggctctggagaaatccctaaactgtcattgaatccaatattaaacaacaacaccggcaataatgatagcagtaacagtattctattaaataacgtttatcctaagcatgataatgcatcaaatgcagtcgatgccatggaaaggtatgataaccccgatgaatatttacaagccataactgatcagttttggaatgaatttaatatcgattggagcaatgacttatggaatactgaggcaatagatgatattctatcatgaaaaaaaaagtataaataacacttactattcttatttagtggaatgttatataataaaaagaaaagaagaaaaaaaataagaaatgatttttatatacatatttaagtagttgttattagtaaatttatttatttatttaaccatttatttatttgtatgtatgtacatctttacagaaagcatgttactgtggactttggtaatactcatcaaaccatggatgatgcaaagcttgctttgcacttaatctcatatcaggatttagttgtaataatccgtgtaatagattaacaacaacatcttctactgggaaatcacaatgagcttgtaaaatcaatttcaaatcttttggtagtctctttgggaagtttgagctgtatttgggtaaagatacaacagaaggccaagttgattcatttggtgttcccatagtttcaaaaatcagcttcaactgttcttcatcgttaccacctgggaacaatggtttccccgtgatcatttctgctagaatacaaccacaggaccaaatatcgatggatgtagagtaagtacgagaccccattaacacatctggtgctctataccataaggtgacaacttcgcttgagaaggtatttactgggataccaaaggcacgtgccagaccaaaatcacctattttcagttgaccctttttatttattagcagattttgtggttttagatcacgatgcaagattttattttcgtgacaaaaagataaaccttcaaacagttgccattggaaatatttgactaaatgcaattcaagaccctttggttgatttccaatggttcttgagtccatgtattttttcaaatcattatccatatactcaaagactagagttagtttgttttctgtgtggatcacatcatataaggccacaatattttcatgtttcaactctttcattaaagaaatctctctgatagcagtagagggtgttccctcttctgagtcaagtttaacttctttcaaagcaatatatgcaccagtagccttatttagacccttatacaccgtggcatatgtaccgttacctaatttttccagttgtttaaattgagatgcagacatgaaagatggatgtagttactatattatgctgtatgtgtaggattaaaaagaagaaaaaaagaaaaattaaagaaaaagaacaacaacaacaacagtgaggctgtgaattggcaactgaaacacaactactaaaacaaataagaaactgctctatattcttttcagataaatattgactattgatcctcttggatttttgctccttttcttgcagacaaatgaaatagaatttcacttttcagaccagtttcaatctaactattactttttttttttttttttttccagattttgattcagatttcggctttctctccttttaaaatcaaacataaaaaaaaaatttctccgcttcttttcttcgttgtcatggaaactaacacgatttcctaaaagggtaatacctgtctcaagcagtaggaaaggcggctgttgatgacataagccgtgtgtttctcgagcacaaagccattggaagcattaaccacaaaactacaaacacaaacagaaatatatactgtgtgcgtgcttatctgtatatatgtgtatgaaaagattttagcctaccttgtgtcaatggtgtgggatctgattggttttgatagtaaacagcttggatcattatcctttgataaaaatatggatatataaaagtgataaagaacaaaaaaaaaacaaatcataatcaaatatctctaaagctattcattagattacacattccgttaataattttcaaacatcaattataacctcgtatattatattatattatattatattatgttacattatactttttgtagtctttttacatgaatgtaatctacacatagacatgttcactcatttctatctgttctgtcgttcttgcacttctaaattcacaaaatacaaactccaaaaagaaaaagaaaaagaaaaaaaacaaaaagattaaacaaacgcacatacaaacgacaaaaaaaaatagtatggaaatattgcgagactgaaaatttcagaaaattcaatgctcttcgaaagaattttacttattattattgaattaaaaaaaaaaaaaagaaataaaaagtgtcatgaacgctattttattatatcttagaacactatgccatatttgtatccttctaattatttatattttttgtaatcaccattatcacagaagaaagtttatccatctagacttttgtgtcttttcttctccttcttcttcttattattattaccattgttagattaagcaaggctaaagataaatatggcaaaagcagcagtggcagtgcataaaaatgatggtttcaaattttgtgtcaatgaaaagagcattcttggagactcttgggtcccgatgtacgcgacacctgaaaaagtaccctttgataaacttcattttgaaaaagctatgctgaatattattagagaaccaaatattaattcaaccgctatactgagagcagatatcttaactgaaaaagaatatgcagtctctttagaacataatttgatacattcaacaagaaatacgtatgaaataaacgaccctgatgccaaaatgatcaagatcgatgatatgaagttacgtgaagtgccaattgagaagtcgttacagttagtaacaaaatatgaaattgttagaagaattattccaagaaatccatataaggatgcaataatgaaccagacttgtctggttatgaacagtattacgcatgccgaaacttcgttgatcatttataaacctcatctagataagaaagatttatgcccgttttatatacctcatgttaatgctgtggccattctattgcaccagaagaatctttcagtgcattatatcccatttaaggacaatgacaataatgacaatgataataataataataatgataataatacttgtaataataacattacaggaaaggtaacagaaaacacagataataataataatggacataaagagcaacaagctaggactcagaaagaactactgcttgatgaatctgaaagagtagtcagaacagcgtataggttgttacaaacatctttcaaacattcaaaaggaactatgcaaggatatgaaaaaagagtcaatcacgatcaagtcgtagaaaaagtaaaatttcaagatcgttacaccaatttgaagaaaaaatattccaaatttctggtggaaaattgggtagaatcaactgatccaaagaaacatgtgtttgaagatattggtatagctgcatttttaattgaattgtggatcaaaatatatggtgaaaactttaaacaaaagatacaatttagggaccttggttgtggaaatgctgtgctatgctatatcttgattcaagaaggtataaatggtataggtattgatgctagacagcggaaatcatggaatatttatccaaaagaggtcaaaagttgtttaaaggaacaagtcataattccatctgtcttaataagaccacatccggaggtaaggaagagaatgccacatatacaacacaatggtggtctatttcctgtcaaagttgcacacgagtatattgcaccagccactataatctattcaagtcatgatttattaaagtcacctcaagttaacattgcagagtatccaaaggatacatttattattggaaatcattctgatgaattaacttgttggatcccgttacttggttatccatttatggtaatcccttgttgctcacataacctttccggtcaaagagtacgttatcatagtaatagtcaaaataaaaaacaaaattcaaaagtcaaaaatagtacatatgcgggattagtggatcacgttgagtcaattgctaagaaagtgggttggcaaattgaaaaggaaatgttaagaataccaagcacaagaaatgcagctctgattggatatgaaaacccctatcttggcaagttccctacgatgcaagtttatgagactattattgaagagggaggagcagaaggttggattcagaatactatggctcttaccaaaagaaatccaagaggtcattagcaatgtcaaaaaaaaaaaaaacgaaataaaaagaaaatcatcctattatgaagtctcaagattggcagatagatgtctgtaattaaagattagtttttataacttatcactacatataaatatgataaatgaataagttgatatataattctatattaatatagagaaaaagatttttcattcaggtttacgtacataatctcctattttgctttctatttttttcttatttctctgtccaaaaactaatgttagccatttttcacattttagagatgctgtttttcttttcaattaaagtgatttttcgaaaaaaaaaaaagaaataataaaagaattactggcatacccagaatgttagatgtatatacacctgcaaatgcctctctgcatatgaaaataaacaaaatctaaagaccatttcatatttttctgcaaacatctaatacacttatatcataacaaaattgtatgttattatttactcttcgttaatcctaattaataatgtttcgtcgaacctttctggctcctgtgagaagatttactttaaataaacgacgatttctatatcatgatttgcaatggaatctagtacgatataactcatttgtaagttctaataaaattaaaaactcgactttaaataccatatttaatgataaaagttgggcacttcaaaatcatttaatcaaggcttttgacaaaaaaagctccattattatggatcaagcaggtgagattattcaaaaaaacgttataccaatctttaaaagatatcctgaattaaaaagtaggttacaaatatcactggaacgtgtgtacaatgacgaaattatatctaaacatgacacagagttgcaactgaagaatattgcctgggctaaattgaagaaacacatctttaatcaacttaccaattatcaactttccaacacatcgttacgcaaatacaacgactatctatttgattataactcattagaatgtatctattccaatattgtaaagaatttagttgaagtggattatgttgatattttgatctggaataaattaataggtaaaaatgtcgaaataattactacacaagataaatatgattacctaatatctcagtgttacaaatatatttatcaacaacaaactataccatttaatttacaactggatgatactgatacattagacactgtagatatttcaaatcctgcacaatggttcaatgaaacaagaaagatgaaacgccatattattatgcatttaggtccaacaaactctggtaagacttttcgtgcattacaaagattgaaacaggctaaaaaaggttattatggaggacctttgcgtctattagcacgtgaagtgcatgacaaatttcgtaatgaggggatccgatgtaatctattaactggtgaagagattatagaagatttaaattcgatgggtaataaagctgggatcacatctggtaccattgaaatgattccattaaacaccaaatttgatgttgtggttattgatgagattcagatgatggctgatccagatcgaggttgggcatggaccaatgcattgctaggtgttcaagctagagaagttcatgtttgtggtgaaccaagtacatacaatattttgaaaaagatagtgaagatgacgggggacaaattaatattaaatgagtatgatagattaggcaaactaaatgttgaaaagaaatcgttagcacataactataaaaaattgcgtaaaggcgattgtcttgttgcattttcgaaaaagaaaattcttgatttaaaattggatattgaaaaaaggacaaattttaaagtcgctgttatatatggtagtttaccacctgagacccgagtacaacaagccaatttattcaacagtggggaatatgatattctagtagcatctgatgctattggaatgggattgaaccttagtatagatagaatcatttttacgactagtaagaaatttaatggatcagagatgattcaattgagtgattcgcagataaaacaaattggtggacgtgctggtagatttaaatcaaactccaacacacaaaccacgaaaaaatctccaagcgatggctgcagaaatcgagattcagataataagtctgttggatacatcactgctatggatggaaaaacattggaagttataagatctggtattgaagctccagtaaaaaatttaaacaaagtggtcatttggcccatagatgaaatatgttcccaattgatgatacgatatccaccaggaacgaaagtgagtttcttattacgtacattggcaaaacaattagaacaagatgaaagtagtatatttgaattatctgatttaagtaataaactgtcagcaatatcgatgtttgaacatatgaatgacatatccttttttgataaattgagactgagcacagcaccagtcaaggatactgccctagtgaaaaaggcgtttattggtttttgtgacactattgcacgaggggagactcgtggattattatcatacaagattcctttccattacttatcttataaatacattcctgatgaatctgtaagtcttgaaaaatatgagtcattatacaatattataatgctattcttctggttaagtaatagatatcctgaatattttgttgacttagaatcagcaagagatttaaaacttttttgtgaattaattatatttgagaagttggatcgtttgaaacgtaatccatatctgctgaagttccgttaaggaaacgataggtattcccatgtatcgcatttacgtagtttaatcttttatataatttatatatctgtaaataatctagtagcaagcattagtaaataagaactctttatatccgtgttgtagtaacattccgccgaccactacgcaaaaagccgtctttaccagtttcacggttttttcggcttgcatttttttttattgtcgtaccgcacacttttttgttttaaagatcaagtcataaacgaagactgcgattttcggtctttaatctcgaggacaaaagtgaaaaaaaagttttgtaacttatccattttggaacagtaagaatcaacattttaagaaactttttaaacacatatataaatttaaaactataaaaaggtgccctaacatcatattcctctttatattttttttattttttttttaagactctttattatcattactaacactcttagatcactgttagattaaagttatcaatctgtaacactatctagtgtcaaggtgtcattaataacaatactatagaaacaaaaaacaaaacaaaatggttgatccagtttatattgttgccgctactagaacgccattaggctccttccaaggttctttatcctctctttctgctaccgaattaggctctattgcattaaaaggtgctttagaaagagttccacagctggatccaaaaaaagattttgatgaaatttattttggtaatgtcatgtccgccaatttgggtcaagctcctgctagacaagttgctttaaatgctggtattggtaatcacattgtcgatgccaccattaacaaggtttgtgcttctggtatgaaggctgttatcttaggtgctcaatctatcctgtgtggtaatgctgatgttgttattgcaggtggttgtgaatccatgtctaacgttccatactatgtgccagctgccagaagtggtgctaaatttggcgacgctaagttagtcgatggtttacaaagagatggtctttgtgatgcctatgacaatttagcgatgggtgttcatggtgaaaagtgtgctaaagattgggaaattgaccgtgaacaacaagataaatttgccattgaatcatatcaaaaagctcaaaagtctcaagctgaaggtaaatttaaagcagaaattatcccagttaccattaaaggtagatatggtaaaaaagatataatagtggaccaagatgaagaaccagctagattgaacattgacaagttgaagaatgctagaactgtcttccaaaaagaaaatggtactttaactgcggctaactcttctccaattaatgatggtgctgctgtgttaattcttgtttctgctaaaaaacttcatgaattgaatttgaaaccattaggtgtcatcaagggttggggtgaagctgcccatgatccaaaggatttcacttgggctccatccttagctgttccaaaggctcttgcacacagtaacgtcactttgaatgatatagattacttcgaatttaatgaagccttctctgtcgttggtattgccaacccaaagatcttagaattaaatgaattacataaggttaacgtttatggtggtgctgtggcattaggtcatccattaggttgttctggtgctagaatcatagtcactttattatctatattgaatcaagaaaggggtaagcttggtgttgctgctatctgtaacggtggtggtggtgcttcttccattgttattgaaagagtgtaaatatcttgcttcttgtttattttttttttatgtttcttctttctttctttgtttaaaaaatttatattcttctcatcattaattgttaccattcctatcattgtttttatattgcgattagattggtagcttattgataaataattaaataaacaggcttatactgaatatatacatatagacacacctataaataaaaataaaaataaatataaatatatgtttgttatgaagaaagtgtaaggactattgcaagaagtataataaagtatggatattatatatatatatatatatatatataaacaattacaaattatatagtggtaaattctaaactaataaatagattagtcagaattattctcaataatcttgttcttcttatcctctagacagaacccattagatagaatatgaatattaatgctgataattacctctagtcttatctctcaataatcataggtctcttaaataaacatctcagtaacttgccatcaatattaatctgaagatcgcttgtccattcaaatacacttacagctttgaacacagagttttaactgtctcaaaccctgcaccttgacatttggcattacccatggattatgtatttcaagatttccaattaggatttcttacagaaaatgattgtctcgaatttgtcgcagatattgttattaaagaaattttttttataaataatcagttaattgacttttttagttgttactatttcattgaactaaaaataaaataaaataaaaaggaattaaataaaaacaagataattatgtgaatacaccattcaaaatatgttttattactaattagtaccaatattttttggtttgtaacacttttcaaaaagaaaaaaaagtaataatatgtcttgaggatccaaaacttaaccattataacatcgtttatttgaaaaaaaaaaaaaaaagaaaactaatatttttataattaaatacatttgattttttaaaacattattctgattcatataatacattaatcctgaaggaatataaataatcattactatcagcaggattatcaagattgttcttatgtttactattaaaataaaaaaaatagttaatacagctttgatataatgttatttcaattgtgatatcaataatattcttttagttagtgttaaaaatcttttttttattttaactaaaaatatgccgaaccaaagattagtctattagtctaacttcacataatgaatcatttagtgcaaataatatagtttctttttcaaactcaaaaaagatatattgtctcctgtctaatttaattcaatacttttcgttttcagtagaaataacgatgatatatttggaaatggtaagattattctcaagacaacaagattcttaaaaaaacaaaacaaaaaaattcaattatttcacttacaatagaatatttcttggacagtaacaatgttagaatagttatgtaactctaaatataatattatttcttaacaataaagtaatctatttcaaacgcacttatatcactagattcttagaatcagtcacattattccccagtaggcaatgaacatattacggaatgaaagaaaacaaagaaaaaaaaccaaagttttcaagattgcaagtaagtagtttttccgaaaagatcaacaacggaacaattgttttaaacaatgcgacaacgtttgacacaacccattatctatcgcgcatatttcttaataatattattgttcagcatttttattccactctttgttttttcgttcttttctaattcgttcgagattaaattatttccggattaattcttgatcattttcccttagaccaatacaataaaaaaacctattcttttgttagggttagtaaaatattaatatgaattgttatagaaaccctaactctatgaaatcgaaacagtggaaaaaacaacaacaagaggaaaaaaaaagaagtgggacgtagtgaaaataagatagaaaaataattttcattttgatctttaacaattattgaaatatataagataaggagaggtatctctcactcccacaatgaaaatatttactatcatttttgcacagttatcattcagaacaacaattctttccttttttctaaataaatatttattttgcttcacaataatcgtctatgtctagtataatatcgcaagacattacttctgagattgaattaccttcacaaaaagatgatttgtctcaaagagatctaatactacttaatgcatatgaaagtgccccatggaatgaaagtgatatttctgataaatcgataactactgtagatagggacctttttttccagatattaatggtagagaatatatccaagtctaaacaatcccaactggatgacattaatacaaaacttgacccaaaaacacaacgtgttgatcgattaaacgcaagcaaagtaaatttgaaacgtcagaaaccagagtttatttcacagattgatttggacagggaggattcctcttctttatcctcctctaataatactttaactagtaacgaaaaagatatgtttagattcaccatacaagggagaaatggcttagtgttttttgcaattaacacatttcaaataaagtggtggaattgtgctttaggagccaagataattatcaaaaagggtacagtttttaataaaaatatgtttattctttgtaataatacgaatgtagtatttcttggtggcattaatagaatttggaatgaaaacagaactttaaaattgaaggactacctaactgcaaagttaaatagagatagaaccaatgctactacaacttcgactttacgaaaaaggaaaacatcgaatattacatagaatgaaaaaaaaaaaagttcaatgactcgtataaagccatcaaattcacattatattttgataattctatgtaactaatttttatcaaactgtatataaattttatcaattatataaatattcttgtctttcaattcaataagatttcccataactcatcaggttctataaaatcatgatgaactattgacactaaacaatagtctgaatgtacttgtcttaaaaatttattcggtggtgtattacgtgggaataactttgcccattcagaccatatactaaatgcttcatctctccaagctttaaacgattcttcctcaattcttgtggtctgaatcactggactgttagggaaaattccccaagtaacaatatttgagctatttggatccaaatttgtttcaaaatttccctgagaatcgcctgcataataactgacaatacgacgtccataatgttttaatttaggtttcaacacagtttcccacagttgtttataaacaaacatttctacaaatgctttttgataaactctaccatttttaggaccccaaccaaagatcttatctgaacttaacgatccattagtcgcaggttgtgatgctaacgtcaaataacctctttcatttaattgaattaattcttcctggataaatgctgtctctgcagataaaccttgatcgtaccatggaattgcatcaattgatccttctaaatgtctaataaaaatattttttaaatctaatatattagttggttgaccccaaagttctaatgctttcttcttactaactttgattgaaggaccataaccatcaatttcaccatatgcaggagaacgtgaatcaccgaaacgaccatttggaaattcgtcccatgtagcatggcgacctaatgtgcctttacccttggagatagatattaaaaattttttagtcggtattttttccgttatgtgaggttcatcttgtttatgaatatatacacgatttctaatcaattccacagatattacacttgatcttcttcttcttttcctgaaatctccagataaggaaatattactttctatatcatccattgatataatatctgcatcatcttctgttataagattattttcatcaaggcttttaatagtggccctatcgtcgtaattactgaaattttttacattattatcattactatcgttatcacataatattgtataattattatcatcagcaccaataccatccgtttcattttcttccaaaatatatgataaggttggtgattgagatacaatttgtgcaattgctttttctaaatttaatgtataaaagtgaaaacatctgactcgaccctgcgttctcttatatatttcttctatgatttctatcaaaatatcaacaccaatggatttcacagagtcatcatcatattgtatttcaggggggaatcgatcaagtatctttgctgggatcgttgcatgggataattttgcagctctattaaataaatgaaaggaatttattggcattagaccaggaaataatggtatgtccttagatacctgttgtctaaacatcatttcaaattcaagaaacttatcaacgtcgtaaaataattgtgttatgacaaaatctgcacctgcatcaatcttttgttttaaatatgctaaatctctgataggatcttgatcatattcaccagagctatcaaaatgcccttcagggtaacctgctacacctatacaaaattcatttccatatttatatttaatatacttaactaaatctgaagcataaataaaacttgttggtacttctaaagatcctggaacatcttcatccattgtattattatttgcatcatgtagtaggtcatttcgattatcattactaatattatcatctaaatctataggtggatcacctctcagcgcaagtatgtttctaattcctgcctttcgacattcttccaaagctttatcaataagttcaggttccatattagtacaagtcaagtgcatacacacaggtatattgctataatttttagagatttcggaagctagctcaatagtttttgtagctgtggtacctcctgcgccccatgtcactgttataaaacttggatccatgatactcattctgcggatacgctctaatagaatattcttacctgattctgtttttggcggaaaaaattccaatgaaatagaagggtcagtcctactgttataatactctataatcgacatttctttttatttgttctcttctctttttatactattatttacgtttacttcactttgtaattttgatagaatatgaaaccaaagaaaaaaaaacctagctccaataattttccatacactaaatcaattgatcttttctttactatccaggaaaactctgaattataataataatacgaatttacaactttaacgcatttactatcgatgatgccaatactgctttaactaggtttgttatacattttacttatttatttttctttggaatgaaaaaatttttaaatgaagaataaaaaatgaaacttttcactgttttacctaaagagggaaacatatctaaaagatgaaatgaactttgattttagcttgtcaaagtaaatttcgatacttttcaaggttaaaatgaagggtattctagattttgtggttggaagtatcaggtcgtaaacataattttaaccaatatggtttagactactgacaaagtataactggaagaaaactctttggtttttcttttttcttttatttttcttttatttttgaataaagaatcatctcaaattgattaaaaccaagaaacaagaaataagataaactaaagaaagagatattactaaacaagtaattgcttacaaaatggcccaaactttgtttgtagaaaatggtgactccgatatagaaggccttcaattagaattgtctatgcaggatgaagatttgacaagaaatactattagtaacttgcaatctgataaaatcaatgatataacaacaaacactattaagattaaggaaggatcaaataatttaactggagatcaaaatgttaattctaatatggctgataaagaaacaaacaatgaaacaatatcaataagccaagaaaataagcaagaagaagaagaggaagatattctcttatatcctttgatccctatagataaaactattgacaaactagaaaataagcctgatttaagcgaaattcgattagtagatatcaatttatcactttcactcccatttcaatatgaaatgttacaaagttgtcttaacacagacgatcctctaatgattttgggaaagggattaggtttatctagtgttgtggcaaacctattatacatattagccacaccaataaaaattgaaaataaattgaaaaattcccttattatagttatgaacgcaacaacaaacgataatcagcgattgtctgatgaattacaagaattatcatggttagatataaacagttcaccaggaaatgacatagaggataaggaatatgacaatactacactaaatgaaagaaagtattatgtcgtcactgcagatgccgtaagtgttgacaagagaagacaattatatctccaaggtggtataataaacgttacatcacgcatattgattgtagatttactgtcaggtatactgcatccaaataaaattacaggaatggttatcttaaatgtggatactcttcgtgattattctaatgagtcatttatcattgaaatatatagaacacaaaatagatggggatttattaaagggttttcagaatgtccagaagcatttatcacggagttttccccgttattaagacgtatgaatgagttaaagtttaaaagagtattattatggccgagatttcgtcttgaaatttcttcagttttaaataaaaattcttcttctactaataataatgttatagaggttaaagtcaacatgacacaatcaatgtcacagacccaatttggtataatgggatgtttaaaaaaatgtattgatgaattaaacaggaaaaatccagaattgtcgatagaatggtggaatattgataatgtattagatataaattttttaaaatcaatagatacggttatgatacctaactggcatagaatttcttatgagtctaaacaattagtgaaagatatcagatttttaaaacatttattaaaattattgatatcgaatgattgtgttgatttctatgaagaaattcaattaaatttggatgcaaataaaccttcggttacaagaaagtattcggagtctccatggttaatggctgaagagtctcaattaattatatcttatgcaagaaagagaatattttttaatgatgaatactgtttggaagaagcacctaaatgggagcaattattaagcataatagatgatatatctcatgaaaaactgttacattctaattcgggacctaccttaattgtatgtcatgacaaatctactgtaaaacaattatctaagattcttaaagtatctaaatcaacaaatggattcaggcactatttgatgaagaaattggaaatctataaacagttaagagaagaacgtaaaaaattagttaatgaagttaaaaaaaaggaaattgaaacctctgatcaggaattgaatgtaagtgtaacttttgccaagaaagaagtaagtacaaatagaagaagaaccagaggtgcatcagccgtagcagctgtggagcgactaagaaactcaggaattaatagtgaaatcgaacatataatacagaaggcagatttcactcaagaattagcagatcataatcttacagatgaggagggagatgaagatatcatttatttatcagaccatgaagaagatgaacaaaatgaaaatttatctagaatagatgaaatagaacaacaattagatcatgtgcttgatgaagaagtttatgaacaattaaaagaagagggttggaaaaagagacaagaacagtttggatttatagacagtagtgatcaaataatcattgaaagattttgcaatattactgacgaatattttttacaggaacttcgatgttctcatatcatattatatgagccagacttagcatttattagaagagtagaaatatatagagccacatatgatggcattctaccaaaagtatttttcatgtattatggtgagagtgtagaagaacaaagccatctaactgcaataaaaagagagaaggatgcattcacaaaattaataaaagaaaacgctaacttagctcatcattacgagacaactgaagatttattccattttaaaaatttagcagaaagaaaaataaaactagccagattaaacaaaagaaatacaagaaatgcaggtggccaaaaaggatttcaaacatatacccaagacgttgtgattgttgatactcgcgagtttaatgcatcattacctggcttactctttcgttatggtattagggttgtgccttgtatgctatcagttggtgattatgtaattactccagatatttgtatcgaaagaaaatctgtttccgatttaataggctctttacaaaataatagattggtaacacaatgtaggaaaatgatccaattttataagtacccaactttattaattgagtttgatcaaggtcaatcattttctttagaaccatttagtgaaagacgtacttataaacgacaaaccaactccagtacacaccccatatctagtaagttatctcagtatgaaatacaattacaactcactaaaatagtgacacgttttccaacattaaaaataatttggtcatcttctccacttcaaagtgttaatattatactggagttaaagatggggagagagcagccagaaccaatagtagctatctcctatggtacaaacttaagaaaaaacgctgctaataaagcaaataaatcaaatacaaaaactgaattattcatagatttattaaaaattccagggttatctaagatagattatttcaatattcgtaaaagcgtaaaaacttatagtaaattgcaacatatgactgtacaacaaattacagatattattggagacataaacctcgctaataaggtttttgaatatgttgctaaacaaaaagaagaaatcgaagaagatgattagtgcatcattatgttactcttcatactaaaactatatattatttacatatttatggaataaatatattaagtttctacaaaagataaacatatatcaaaatttggggaagcgtttagtattagatataatatctaaatttcatctaaaattttattccttaaatccaaaaataatctcatttcatttgcaaaagttgcatcactagaagggtgcattataatcttatataaatcagcttcagaaggtagtaagtaaggaaattctgcaattttctgacatgaagcaggatcgagtgcactttcagatattaacagtcttaataatcttataatcttgtaatttaaattattataaaatgattgatattcttctttcttactcaataactcttggtaaagctcatataattttctaaaattaattcccaaattctcactacctgtcaaccattctaaaaagatattttcttttttatttctagtattgttattttcttcaattatagataagaatagatggtacaaactagtcaaaacctgagaaataactggtgatatgcttttaagaagggataggtcttcttttagttgttggaaaggaacaattgagaataggtacttgatcaaatcattacacagatcaccgttttcattatattttaaaatcaatcttttcgccattttaacgtcatcgttaattgttatattcttatcattaaagttgtttaataatacaacctttaaatattgtctgtttgggtgttcaagagaaagcaacttagccagtgtatccacactataactctgataattacttatttttaatgggtactcatcatatgttaaattatccttttctgcactattcttttttgaaaatccaaagcttagaattaacaaaattaatgttactgtaaaagtatatgattcaattctccaatggtgtgaaatattagacaaggtaataatcatatcctttttgaaattaaataacttcctatgaaatttaaattttgcactatctgtaaataaaagccatgctaagtcattgaaatatcttttcaaaaagaaattttgagacatgatcattgaatttatatcagaaaaggagatatttctaagaatcatagagattgtggataattgatctaggattaaaatagaaacatcatctgcaccttttatatgaatctttgaaaaaggtgagtcggtttcacatctaatattctttaatgcctccatataggatggtacaaaaatagataaattttcaatatcatattgggatctgattgatggtatacgtgatgtccatttatgagcgactttatcaaaattgttatcctctttattaagaacaatggaatctatctctgaattagaaggaacctcaatatttatggttctttctgttatcccaatttgatcaatatcacaaccagttaaggaatctaccaaaataactttatcagttttggaatcagtcacaccaacgtttgccaatgttacatattccttaaatgtgtcatatatagacttatttccttcagaaaaggaagtacttatgttatcaaggtatccttctacatcatactggtctgcataatcagatacaaatgataaatttttatcacgcaatatcttcctttcagatgatttttttatatgggttagatcatctaataagttaattgccaattttgctagagaatttaataaggatgggcattgatttaaggctatttttagttgagcgtctgcactcgaaactaataaggtgtttaaggcagtagtaatttctcctaaattgttacactgtaatgacattgaaatagcatgcaaatttaccgtcccgagttctggtgcaaataagaaaattggcttatgtgagtttattttttcaccaatttgtgatatgtaattaatatcataaccatttgtataatctatttttctttctcttggtttataatttctaataaacgttcttttataaacttttggtagctttgccaactctgtttcataacgttgcttaattttttgctctaaaattattttttcttgtaattcttgtgcttctaataattttctttgttctagctcttgttcttctttttgttttctttctaattccaattcttttttagtctttttcttttgtcttggtttcctgggtttcttcggaccccttttattagtagtcttgttagttgtcatctctgaagaaagatttactgaactagatggctgtatcatttggggatttaaatttacagacattaaatttggcgtagccatattaagtgaattagatactaggttatttgcagacatattagctgaattcatggtagttggtacgaaattgggtgagccagccccaggtatatttgtattattaccaatatcattattaaatgatatattctgattaacatttgatacgttttgaagcttgttctgttgtagattaatatcgttaaattgatttggattcattgtctgctgctgctgctgttgttgttgttggtggtggtggtgaacattttctaattgaatctttcttaataattcctgtaaaaattgttgcaaaaaattcttttttgctaaggactcttttctaccttcatctgtattcatatatttttcataacctagtaaaatattataatatatcatttgtaattgttgtgggtccagtatccgtaatttattagcaatttgattccaaagttgtttttttgtaacttcctcgtaaccaccgttttttgttaccatcaaagataaataaaatagattaacttttttgttttgaatctctggaatggattgtaaaggtgcatttcgcctttttgaattttcaattagagatttcatgaatagttcatattgtttattatttacctctatagatattttttgttgtaaagatggacttaaactttgtaaaatattcttttgatgttgcaagtgttgtaaatgttgtctttgctgtggagtcaaatttgcagattgattcattggagtcatatttatgttattatagttgttatttggagtattcaaggaggatgtcgttgtcataggagaattgtttgtaatgttactattatttctattatttaatataatattacttgtaattggtgaattcatagaagtttgtattctctcttgctgttgctgctgttgttgttgttgtcgtaactcaattaatctttgttgttgtaaatttgctaatatatgatttctatcaagaaaaatattattattattattattattattattattattattattattattattattattattattattattattattattattattagttctgtttgtaatattaggattatttgtgttattactattattattattgttgttgttgttgctgttactattactgttattattactattattattattattattcatattaatggttccgatcataggtgatgcattagatagaacaggtgatccatgtgtagataatacttgttgtggttgaatattaatattgttgctgctagaggcggggtttattgtgtttgtattattgctattatgattaaacattagaatctgttgtggtgtggctgatgccatgttatactgtgaaggagaaatgttgttgacattagtgttgttactattgttaatattgttactgttcatatttatagattgctcatatagagatcccattcccatattagacgattgagtattcaaaaagtcatttgaagtattatcgttattgttattgttattgttattattaagattagcgcccattgaatcaaaaaaggcgttaaaactgtcccttgcattgttgcttgtgttatatccaccacttccgctgccagtgccagtattagctacaatgttatcctgattattattttccgtagaaaacattggaatctgcctatattaaacccagagaattccttcaaaaagattacaaattgctaattctgtttaaacacctagtatgttgtgtcttgtattcttttacaaaaaaaaaaaaaaaaagaaaaataacgtttttgtataagagcctactgcaacgtacacggaaagaaagtatctatataagtaaaagtaagaggcaaacagaaaaacttactttgacttattaatagttagaccttattctggaaacagtgtgctactgctctagttcaaagttaatggccttttcttgttattcatccgttgcaactctaaactgttcaaattggatttgtatctttggaaaaaaaaaatgaaaaggaaaaaaaaaaaaagaataagcattaatagttcattacttcgtagattgtgacaataaaaacattgcacgtaaaaaactacatatacgctagatcattacacacgcacgtttatttactcatcatcattagatgatgacgacgatgacgaactgtagccagatattaacggtaatggtgatgcggtagtgccgttgttattgctagcatcattttcattcccatcatgtgtgttttctttggataactttctttttttcgttaattgaatactgtgtgtaccactgttactattgtcttctatctcttccttacccttggttgtacttatattactgttttggggattatattcttttagtatagatttcattaggtttattgattcttcttgtctctgtaatgttctctgtcttttggcaattggatcagggtcttcatgtgcccatttaacaagtaatccagttccatccatgcgtctattccattctttatcgttgggtatcaaaagagtttgattagacattgcttctttagcaaactcggcattgatagaccacttgtattcaacaaatgcacaatttttatcttccaagtatcgtatcttgttgattgctcccaagggctcgaacaaatacttcagtctattttcgatctgtatgggttttaagctcatatcatttaaggcatttgatataccgccgatgtacaaagtcgaattatcatttcgaaaggaccctacaccactcatgtcgtctctataatgtgaatatttcaatctaccaaaacagtctttgactctggaccgtccgatcctatcatcactatttatctctggtatatggtgtaaatatttacatttagatccaattacacagcaacctcttgcaaaatatagacaataagtgttacagtcaggatctgaatccgtcacaccggagtccctagcgggatccaacctgaaaggtgaaacatatctatgcgaattgttgacaccattgccaggaccagtcccatgggaccatttattgtaccagatattaaatgttgtaccagtttgtggtgggacacctgatggtaaatccgactctctaatttgtcttcttgctttacgatttctccaattgctacttcccatcttcacctaaatattagaatgctttatttgctttatttgctttatttatttattcattcatgaaccagctagcgatcctacagtttagaaatgttgtttaagtcttcaccacacaggaagaatcgtcctaaaacccaaattttcttttcttttcttcttttttttttagtttcttttttttttttgattcgttgttgcggattttgccgccaagccattattccgaaacaaaaccgcatttttgtatgaagtgatctatttatcacaaaaaagaaaaaagaaaaaagaaaaaagaaaaataaaccctaagtatttcttttattttttttttttttaagtaaactgattagaggatcacattgctctgaagatattgacaaattctattacattgtagtaagacatttgtttgatcacaaagaaaatactgtaaatttagtatatcggttaaactatttttatctagtgtcctatttgatttatcatactattatcagaacaacaacaacaacaacaacaacaacaacaacaacaacaacaataataataataataataataataataataataataacatgagatttagtttagatgactatttggtttctgaatcaaaattgaataatggctcagttactttaacgtcatcaatttcaaacttggatacttcttcattacacactaatataaggaatcctgcactcagggagacaaatgtggatactattttagatccagaattggatcaacttgtacaacgattggtcattgatattaataaattgcctaacactacgctcaacgaaccatatatatcaaatatccacatttctaatgaaaattcatggccaagaaaatcgcgtatagaggactctcaatctttttcttctgttatatctgactctaaagtccaccattatgtagataatacaagtatgattgaatcgttaagtttgttattaaagaataaatttaaacagttgtctgagattaataataatcaagtagattatatacgtaaagaaaaaaaacgtcaagaggaaaataaattaaaagaattggaaaggcaaagacaggaaaagttgagacttgaaaaagaagctaaattggaagctgaaaaattacaaaagaaacaagaacagttgaaacgtgaaaaagaaattaaattgcaacaagagaaggcagaacttgccaaacaagaaaaattgaaccagttgaaaaaggcaaaatctgccaaatatataactaatagagactcaatagaatccctattttggtcctataaacaaaaaatccaatcaattaaagatgaaattgtattacctataaagatggctcaaaaaccaattaaatcaccgattatggcccagaaaagaaagattaatccaaaattcggtcaactgacaaattcttggaaacaattacaattaattcaaaacgaattggtgacgttaattaatcagtgtaaggatgccaccacctccactacaaacccatccccgctagcctttaagtggatattgaattttgttgcaaaggcaattgtgcatcaaagtgaatccgagattggtgttaaaccagaaagtgcattaccattggcaagattaacaatttttcttttgaatcaataccctgaattatcagactttttaatggcaaggtttgtcaaaaaatgcccatacattatcggctactcatccttacaagacactgaacaacgcagaatcaatatgggttggaaacgtaaaagtgatgggaaatgggaaaacgacactacctatgatgaaagaatgaatgggatgataacgttgtattctacaattacaaaattaaactctgtcaatttgcctgatccagagcaatctcaattatggaatattgaatccagttggaggcttgtggcaaggatggctaatttgcctaaatctttattaattaatacacattttgtgatacttggtgggtggtgggatgcatgtggatgtgaatttatcaaaaaatatgggaatcaaagtgtgaagttattaaatttgatagctaatgaaatgacgaatttagtgagtgaaaagaaatttgtaggtgctgcaagattaaggatcctttatgaagaatggcagatgactggtaccattaaaagtttcccagagatggtagagtaaaaaaaattagaaaataacagaaatggcagagaaggcggggtaacattaggctgattgatgatttattcatcgtaactgtgataattagcctttaaatattcataaataaataaaacaattaaatcaaataaataagtaaataaataaatggatagttaaataaatagatagatataaataactgtcattacatatcttccaatcagcattataaacaattacaggtattacaaatatctagatgcattgatcgtctccaaaatttctctagcaccattattcatcatcttagtggctaaatctttaccacatttaattgaatcattatacatgtcatgaatatgcacagtcattgaatcttccacaaagtcaacaccatcacagtcaataacaatacaatttaaagttaattctttctgctcagcattataagaagatgtcaccccaataggtacagaacaaccaccttccatagtacgtagaagagatctttccgctagacaacagacagtagactctatgtcttctatagtttttaaaattgatttaattctttggtcatttttccttatctcaacacctaaagcaccttgaccaacagcatgatatgtaggtaacctttgagatattctattttgtaaatttaaacggataagaccggcagaagctagtacaatagcgtcaaattcatgtctctcatttggattagctggtaaactgtctaatttacttaatcttgtttgtatattacctctaatgttcttgaatctccagttcgggaacaatcttttcaattgagccgaacgtctaatcgaacttgttccaaccacagcatcattaggtaaatcatcccaagttttatatatagagttttgtgggaagacaagacagtcagtggggtcgattcttctcacaatacaacctaattcaaaattatcaggcagattagtaggcatatcttttaaggaatgaacaattatgtcgatgcaatatgaatggtcaagattcgactccttaccgcaatataataagtcctccaactcttttgtccatagagacttgccaccaaaggaatacaatggtttaaattggatttgatcacctagggtttttttagaaataatattgcattgatattggttatctgtatttgattcgatcaagtgcttaactgattcagattgtattactgctaacttagaggatcttccaccgatgttaataattgttttagtcatacttttcttcttgtcagtgatcgtgttggtagctgatatagttgcaacagagggaatagtaattgtatctgtcggaatatggtgagacaaattatagatagaagtaccttcctggtttaaagtcattacctcctgtgaaaaagaattgtaataaggaataaaaatttagcgattaagaaaataaaaagaaatgaaaaattaagaagaatttgcaaatgtaaaccacaaaatggaagaaaccaccaaaaggattgtacagacaggaattaaacaatatgtacaggaaaaataatttaagttgggttaactctggattaataactactgagtagaagaatagcgtatgagtgtgtgtataggtgagtaggtaagctattggaacaactaaaatcaattcctatcttttagccatgcagatacgtagatacgtacgcttattatccaagtcgattatcttgagagtgcagttaaatatgattatattcaataacttcgacggagaaactccaaaggaaaaaaggaaaaaagggacagaaagaaagagagaacgaatagtatataaaagtataaaccacgataataatagtgacagtacatgaaggaaacaaagcgtcttttaatctttttgaagtttaaggacaatcaactttcaatatatgtattatttcacatttttacattactcatcaaatcagtctggaaaaagaaaaaaaaaaatagaaaaaaataaaaaaaaagaagaacaaaccatctcattaatcacttcattatttgtcgattaggaatttgtacgaaagaaatgggaaaaaaaatgaaaagcaaaacaaatgtaacgttcacgtgactcaaaaaattgaaatccgtacaccacatagtgtgtaatatcaataatatgtttcttgtacatgattggttgaaagttttgataggtatggtgttatgatgtatgtattcctggaacaaatttcttgttagtcatttctggctagccaacagccccagaagaaatcttactaagcagtgaaaaaggtgttaacaacagtagtattgctctattagtaataataatgtgtcagaaaatgtcatatttcttttcatctttttgactgaatcaaccacacctatatactaaatttattttattttttttcttcctttttatcgataaatatttaatttaatacaccatactggcagtgtcatagcctatgttaacaatggagctttctagctataaaaatagatatatcaatgtaatgacaattctcactgctgtataaatacgataatgacaatgacaaaaatattaactttgatcttagatatttatcgtagataagaatatagaatagatggaagtcaaaaaagaaaaaaataaaagaataacgtaagtatggaagttaatgtaaaatatttttttttatattatgttattccttgaaactagaatcagtgtcgattgattgttctctttcattttgttgcaaaccggatgaaagtcacttacataagaaacatgaaaagtagaaactatgaaatcaaaatagttgatcaaacattgagattggaggaaataagtaaagacttatcatagtttggttttttttctatctagctcacaacatggggcatccttcattattattttaatgtattcaacgtcaaggcggcgaataattcaaacgatattggaattttttttgtgtatgatcctattaatatattgcaaatactacatgtgattatatatatactgttatagactcatcgaatatgtaatctatccggtatctccgacatattttctcaagcctctgcgagaatttcttttttgcctttttttttttctggtttgtccctttttctccgcattttctctttgcatcttgttgaaactgtgcttgtgcatttccagggttcaacttgtaagagtagcgtttcttgcaacaaaaataacattgtcgtaatgtttttgaagtattttcttcacccccccccacacacacttctccatttacctgtatattgatataggtgtcatcactagattaatacatccgttctaggatgtggattgttgcaacgatgatagtacgttgtgtgcacgttccactttcaatcgtactgctggtggcgtattattttgtaaacatgcatatgccttctcagaccatgttaatgcttgattgaaattaggttttaatacacccggaatacctgtaatataccatcctattatacctaacatgctcattatattcaacttctggttactgttattatcgttagtattggttttctttactgattccaccgatttataataccatgcaagagattttactcctgttaccggtaatcccagtaatccacgttcataacaatatccaagtttccattgtgctaaagaataattgtatttgttagcgcatttataataatattttaatgctaatttgttattcttgatattcttattcaattgtatttgtaaccattcaggtaagtcattaaattcatatattttagccatctcaaagcatgcatggaatgatccatatgaatcggccatctcaaaccactccatacattgtataatatcacataagtcatatagatatatgtatcctaaccgaaacatgcaattatggttctcacaatattcactgcctcttttataccattcaatggcttggtcaatatctttatctatacctttcccgtattcataacatatcccacatctataacagcattcgtcatgtctcaacttggctcccatcttatagtattttaatgccttagaatcatcgtgatccaaaaatgttattggaaacttatatttgtttgaaaatagacagcccatcaaataaaatgatggtccatatttcaacctcatcaatttacttatcactttcatcgaatgctcaattatgatattttggttttgtagcatcttcggctgacttaatttgtgtggtaatttttctccatttattgtgtattgagatataaaggcttcattcatggctacctcaatcaatatctcacaccattgtagctgtaactcaggtgtaaaagtttgatgatctttaataattagtcgatatattgtcatgaatctatcaagcaacattgaatcttcttgactgactccctcagtgagattggcagcaccattcttgttgcttttaccattacttggttcatcactagggtataaattaataaaattattgtatctatctgtatcattcattatattataaacaagttaaaagcaaaaaaaaatgtaaaaatacaaaaataatactattaatacaaacgaataaacatagaactattactcttcttgtctattttccaactgtttttctttaccaaaaaaccatctatttattcatgtgatatgtgatagatagttatagtagcttttcttttttttttttattcaaattgattattctagataaatatatgttaacaaatgttcttgtattattatctcacagtaatttttagaacatgaaactatccatcaacatatagtctaatgtaatgtaatacatacctggtgaacatgttttcactgtagaaatttcttttttttgttcaatatttgcatgtaaatatttacatcaattagtttgaaatgttcaattcttccccatttgtggaaaaatgtttgtcttctgcccgaagaaattgaaaaatttatgcatcgaaaggaaaaacaaaaaatgaagagaaccatcaaaaatagggatttacatgaaaaatacactatagagttataggtatgtaccgcgtggggatattggtgattgcaaccgtgtggtcataacattttatatattattacaagagtttagagaatacatttgaacaagttggtcgtttagtttttgttgtagttgttttttttacaaaattagagattaggaggaaagaaggtaagcaaggaacggaatcatgaacaggttaagccttatctctaataagttatgtagaggtttccatactgatgcgtttaaattaagtattaaatatccaccaataattactgcaaaacaagtttcaaattcaaaaaaacagaaaaacttaagattaagtgtcaagccattgaattctaagaaaactttattgatagatcaatataaaaatgtttgggataataataaaatgattattttttgtcattataataatcttttgaaacaagaagatcatcaattaagattacaattaacgaatattaccaaaaatatcagcgatcaagatgaaaataaaatcagctttattcatataagaaataatttatttaaagttttcttgcaaaatatgaatcttgaggatcctgttgcaccatatgataagaaaaaagattattccaagctgatagtcaatcatccattaaataaattgattaaaggtccaactgctataattgcgtaccctaaagctgattgtaatataatgagatcaattgttcaattaatttcaaattcaaaaggtaaattgatcccacttggtggtgttattgaggggaaagtcttgaatcttgactggattaatgcattcaatcaaatcaatgctactcaagatcaattgtaccaaatgttggtatctcaattatcatacaatgctggtggtaacttgattgatactttacaactgttgtctaataacttagttggatctttatccattcaccaggataatttgtctcctgaaaataaacaattgaatgaataaatcaagaagtcaagacagtcaaatataatcattaactctcttttttcatgtaaatatagatttgcgcacttatctctaaatacaatagataaatatatatatttaaacaaatagcctctgactacgtgtatatattttatctttcttctccttacttacttgataatttatctaatagttttcgtttaatatcaactccccatctatatcccttgaagttaccatttttgtctactacaaagtggcatgggattattaatgctaatttattggatgcacaagctctagctatggctctttgtccatttggttttcccatagttgatttagccaattgaccataacttatcgttttaccaggtgttagtttatgtaattgattccaaacttttctttgaaaaggggtgccaaatattatgtcatatttaatgtttgtattgtaataaaatgtaacactatttaaaaggtttctgtaatcatcaatcaactgctttatagctacaatatctgtgttatccatggaaccatttttttctttatcgattctaaggggtattaaattatatttttcatttgattttgaatatagtttattgaaatctgattttgctgtttttaatagatcaaatttatttctacctaaggcagcatagactaaatggcagttatagtaatctataatgattaaagcgtcagtgatttccccttcaataaaagtatatccgtactttttcattgtgctctggcttctagttctttctttttaagtttttctactatttacattaataccactgttattaatttcaatacatcatttacatttagcattaaatatatacactttctgtctctatgcacaagtcttcttacactatacacatttatgtacatatatatatatataaacctgattactaattaaatatttaatatcacaatttgatccaattcaccaataaaactatttgattataaaaaaaaaaaaaagaaaaaaaaataaagactatcatcagcaaaacacataacaaataataagcataaaaacaatagtaattatgataaatgggtattactaattggatttacctgttagtaaggcatcgaattttggaattagtgattgtgccaatgcaaatgaaaagactaatttaggaccagtagtcaataattttggtgttaaccctttgaaaaatgcagtgataccttcattctttaaagtgtttttaacgatggtgaacccactctctgggttatcaaaatgtctattttgaattctagtcttaataacatctaatggagcagaaacaattagagatgcagaggcaccaacaatagaagaaatgaaattttgaccccaagtagcttgagaataatcttgtaagcttaaaatgtattctttagcaaaagcgttaccaccgaatagagcaaaagaacctggtgcatttctagcagcagtccaaccccaacctctgtatagattgaaaataccttcatcctttaaaattttaataaaacctctacccttaaaggcttctggattagtttgtcttttgattttcaagacgtctaagggtaataagataatttcaccgataccaatcatggaacctgcagtagcagatctcattgctttaccagttttttcgccgaatgctaaatcaaaatctttcttaaaatgtttatttaagaattcattagcaaatggttgaccaccatatttatacacacgttgtaaaaccttatagcatgctgcatatcccagacctggaaataaagataatagtcttttaccaattgagtattctgctgcatcacggaaaatgacagaatttaattgagaagcatttaagattttagtatggtttgacattaatcttttggaaatcgtgtctactggatggaaaacaccaatttccaatatacctgcagaagcagaacctaaaagacgagctctaccggattgttttttatcgctgttggacatgttaggtacagagcagaaattgcaaaatacagtttatatgtatatttatgtatatgtatatgtatatatatacgtgtgtgtatagatatataagttactcttgcttgatatatgaacaatcactattcaacaagataaaataactaatgctaacggtgcgtgaaacaatatcgaatgtcttttaataagatagtaatattctcgattcctgagatctggtaaaattgttctcatcaacctcgataatttagaatgactaagaaataaaaaaaacaagaaaaaataacaaatattttttttctttttttgtttcagcttttttaaaaaactcttcactcgagcatcaaaaaggggaaaaaaacgaaactttaaagggaataataagagaatcggagagacagagattttttttaagagtgtagctttgtagtaatagtattcatttttggaacacattcatgtgcgaataaaatgttaaatggagaaagaaggaaatgcatgattttagattgtaataaatatagtttcaattgtttgctcagaacactaatgtaagcttatttcatatcaagccatcgtaattgtcgttttatacagtcagtaggtccttgcaataattggtaaaatgagataaaagtatttatatgttaattcttttaaggctgttgcttacatatttacttacttacgtatgtggatggaagatatacaagcccacatgttaatatggcatattggacaatttttttcttacctcgttgagttatcagctttgttattcattgttaaagttgtctcaatggtactaatgggtgtagtagtagtagtagtagtggcggtggtggtagttgtagcagttgtattagtagaaattgtagaagtggatggtaccacttctttacgtgattgtatttgtggcattgatgctgaatttttttcttgttcattatttatactattcgtgttttcttgattcgttgatgttggagttggttcctttgttgctagaggagtctctgtttttgttgagtttatcgtagaaacagcagcagtttctttagtgaatgagtttaaagatgatggtgctgtagttttatcaggattatatgaagaatttgatattgtttgggatgattcttccttttctttagaagttgttttttcaactttgtctgatattttaatggtttcaatatgtttattagtgtctgcagttgtggtattagtcgtagtggtggttgtctccttatttttatttacgttattcttagaaatatgattattattatcgagtgtgtttgtagttgaagtaggtaatatcacaccaaaattgttattagttgaattggtggttacatgattgattttatttattggtgtaaatgaagatggtactaaagtgttaattgtattttgattatttgtggtagtatgagtattagtaataattcttgtgttagtagaaatatcaggagagatgttatttgatgtaactttactattaataatagttttgttattgtttggaagattttgataattaatggtactatcaatttccgtattgataatattgttattagagttattagtattatttacattctgatgtacagtataaaaaggagtactggatgcgttttgtttaattgcattatttgagattgaattattaatattttctggtttgtcttgtattgctagtaccatattagtttgttggaacacagtattgttagcattactattattattgagattattattcttattgttatttacattatttttaactattatgtttggttgatgttggttactattattaatgttgttgttattaaaagtattttgttgaagtaaatttgtattgttttgagtttgttgatttatttgaaattggagattatctgggggattgagcaattttgatgtaaccatatttaatatatttatagcattaaatacatcagttttaccaatttgatctctcatatttggattattagagatgatactaagacatgattgtacatcacgcaacaatctttgacgttcttctttaattaggagttgaataataggagaatcacgattaaatgtttgattcatattagctgtaatttgtttatattggttcaataacactaaatattgtgttttcaatgtgctcatttctcttttatgttcagttttggctaaatcaagtaaactttcgtaacttttcttttggctattaataatttcacttactgtatcagagtttggaatatttagagtttggtaatgatgtacagctaatagttcatttttaaccttggataattcactgtttaataaaactatcgttgcttgttttgttttttgcgcattttgtgctacttgtaactcctgcatcaattttttgatctcagtttcataatttgctttaagggtatttatattgttagtattgttattgtctgcattgatattgttcaactttgcctttaactgagcaacttcgttttgccattttgtttcttgctgagtaacattatttcgtaaatcgttgattaatatatttgattcatttttctccttttctaactttgcaatatatatacttgcattttgcatatatttttgtgatttatcgatatagtctctcatacttgctacgtcaatgtttcttctttgttctaatgcagcaaatgctttttcagatttatttaataaaatttgataatttgccgttctgttatttaatatagcgtgtaagtttttcagatcattattgtatgtctcaattgtttccttcaattttttaatatatggagattccataggtgttgttagatctttaatatttgataaatggctattttctttgatttgattctctaaagaattttgtaaatcttcatattgattcagtctcatcattatattattttccaatttctgtaaattggcttttgtgacaaccatatcgttattttgtgatgaagtgttgggaagattttgcttgtcttgatctacttcttgttgttcttcttcctctttcttttcctcttcctcttcttctttatcgttatctttaataccatgtatatctattttttgcgattgcgtaatgctagtggcaaggttgttaactgaacaagtcgaatgatttgaatgaaggctgttgataagattatttctaattctttggaaatctatttttgtagtaatcaaatcgttaatcagataattattcaaactgtttaaattctggttattaactcgtaaagtttccaattgaccatgaagtcttgaaatttcaaattgattacttagaatttcctttgtgatgatattagtattgttcctgaataagatttcattttgtttataaccatcgattttattatgtaattttttaatttttttcttcaatttgttcgtctcgacatgatcagtatcattgtcgttctcgatatgaacttcacttttgactttatttgcatcgctattgtcgttgttgttattgttattattagtaataggagtggtagtattatcttgtgttatgtttttttattattattttggtcttttttttgtttaatttatcgctggcgccagtgaaattgaggtcattggttacagtagtggtagaagatgaagacgtatttgtagtgattgaaggtaaagccggttcgatctgttcttttttaacatgttgtttaaattgattgattgaaaataaacgaaatctgctattattcttgttattattattatgtttatgattactttgttgttgtttttgaatgatagcagattgaccgttacttaataaacgtgggctttgacctggatatgcattctttacagaagatgttgttgatgttgaaattgagtttgatgttgaggaaggtagctgtttcttagtaatattatcaattggtttccatttcatgccaaccatagtagaatcaaccattagttaacagttatatacgtggatatttggggaggggttattacggatatattttcaagaaaagtaactatgactgtgaaagtaaaatatacatcgccatatatgtactaactatgacgaactcaagtaaattatattattattattgttattattactattattattattattattctatattagtatcctacttttttttctttctttttggtcctttttttccttctttttcacgttgatgcgtcattttacaatactaattttttttatcgttctttatttatgtttacgtgttaggttctactttcaaaaagttaaaaaaaaattttttttatttccacttacttcctcttcttctcccaggaaaaaaaaaataaaaaaaaaaaaaaaaaaaaagaatatctcatgtaaaacctatgtgtaaaactttcttccaacattggaaaagtgcatcagccctatataaaaaaaattatacattagaaaaaggttgaatgagaaacaaccttttaggtctttctggtttacaatagtccccattttaaagttagggttttgtaaaggatattttgaaagaggtgtgtgtgcaagctatgtttgaactgtttacgttcgtgtatgggtccacaaactgagtgatagagaatgaacgagggaaaatatccaaaaatcacagatttgaaagtgtgtagaaacaaactagtgtgtaccttttttgttatttgatgatacttgtgcatgcgtatatatgtatatatgtatatatgtatatattgttttcttattaaatggcttcaatcgacttttgtcaattatttggatagtccgatagaggggatctattgaaacaacaggaattattatttttgtttatttcgatcggaggctgtagcatagtatttcccttgtgctttctcttctgctaatgttattacgtaagaaagaaaaagaaaaaaattaaatcaaattctgccaaggatgtgaaatcatgatggaatgttcattctttttttttgtttttttccttttttactgtaccctcattttgcaccttacaggatagggataaaatataaacaggtcctaacttttcttgtcttcattttctttttttctttttttttaggaagggtcgttttcttctattgtcgaaataagggtatacttcgtagaaaatgatgtagacctttttttttattcatttcttcttttttcctttggtgaacaaaacaaaacaaaacaatcgaacgcggcgatggcagacaaagcaaactacacacacacaaaaataaaaaaataaaaaaaaatctgtcgttgttgttttgttttgttttgttttgttttgtttttcgtttccccttcaagactctctgtttgtttgttttcaattcaattcgactaagcacattgttatctgtcttttttttatttttatttttcgttttaaaggtttaacagtccgtgcaaacataatgcagcacaagttgcaatcattctactccattcaataatgatatagggatacgcttacttctcttagtttctattcaaggtaaaagattaaatcaaaaagaagaagaacacttgattatatacatacacaccttcatatatatatgaactatatatatatatatatatatatatatgattctattacacataatagaagtcaattggtttgatttgttttaattttttttcttatttgttattgttgttcttattctttctttctatatactaagtaattatcatttgttaatataagtttatcaactaaagttgttcaataaaaaaaagggaagtttggtttggtttattaaaacaggaagaaacacatataactatcattaagaatactactgttatttttcttctcttttcttttcttttggtttattttttttttttttgcaatatggtttttggatttattaagaaggaacgtagagtgccagatctttcgagatacgattactattatcaacagaataatctagattataataaatcgcatagactgtccactgcagctgcgtctgctgcggctgctatcagatcaggtagcaatagtcctgtcttaaatacccacagtttcaattcaagaagaactcaatccatgatatatgactctaatccatacacacatgttccccacaccaacagtaatatccatattaatactcgttctgtttctaaagatctaagaagaaaaacaatcaataataataataatattcaaagcaaacaaaaaattaaaggtaggcatgagaataatcatggtgattcaaatattaactataaaaagacttattctttgagatctcgatcaacgtttgatagaaatatcgatttatcttctatgaaacaaagaaataataatcataataataataataataatattcgttctaaatcttctggtagtacaacaataccgactgccgtgaaccaaagaagactaaatagtttatcctctacaaatggacgtagttcaaggttgaattcattgacttcaaatggtaatgcaagaaggcttaaaagacagcaacaacagcaacagcaacagataaataatcctaataatattcttggtcaatcatctagaactaactccatcactactacagttacaagggtcactgatccacttggaagaaccacttccatcactaaaaagactataaaacgtattgatggatacgaatacgttgaaactactacaaccaccacaaatttggttcccttaaacgaacttgctgacgatgatgacaataataatattaataacaagttattaaatccttctattcaaaaacattttgatgagtttagtgataattttaatatgactgaagatgaagaccatgattcaacaatgttaaatgatataggcaataacactatggacactaatgataacactaataatttatccctgaccaatgaaaccgattcgtatcacgatgaacttatacaagatagctctcattataataatattgatgacactttggataatgggactttgcaggaattagatgaagatttatcactaccaaaagaaattattgaggaaacagcttatgatataaatatgaagaataacaacaacatccataatacgagtgcgaatgattcaacagcaatagacggaaccccaggatatgaatatgataatttattactcgacgatattgtagaggaagatgagaaagtttctcaggatgatgaaattgaagaactcgaaaaggagcttgataaagatttacatgatggaaaaggatataatagtaatatccataatcatcacgatgatgattaccaggacgaaaataaggaatacaccgttgatgataaattcgaccagatggaaattcaaaataagcatttcacacatccctatgtttctggtttaattccattggatgaaacaagtagtttatctaaattctctgatactatgggatctatgccgtcttcaaaggagaatttggttcttcataaatcgaatatatccaaaggatcgtctatctctacaactacccataagagtaataataacagaacgtccatgaccagtaaaagaccagtgaagaaaaagtcgttgttaatcgccaatctgttagcaaggatgaaacaacagtaaatacgaaaaatgcaggaaagaagaatggtaggtcaatacagccgtcattatcatcatcgtcacattctccatcgcgacaaatacctaaaaagcatttaacagaacaagaaatgtacataaaggcattggaagttgcaaagaaaaagtttataacaatacatatggtactggggcatctggtcaatttaatacagtacatggtgatacaagaagtacaatgggctccagaatgactttacgagatcaatctattcctaaagaatcaattgtaccttattataatacgcctcatagcactaataagcatagcttgaagttgtttgggtcatcattattctctaagaataagcatgaaaagaatatatctgctgtaatatcttcttcttctccagttacatcaatgacgaaaacagtcactaatagttcaagcgggcaaacctctattaactcattaccgtattctcaatctagggtacattcagtatcacaaaactcaccaactcacaataattctaaaaatgaaaagcagcaggcgttatctgatgaagatatgtatgctaaagctttggaacttgcacaaaagagatttaatgaggcccagaagaagttgatacagagacaaagacaaggacagaagaatactgttaaagaatccaaaaatatagtgaaagacgacccagtaaagtctacaaatcaaaatagtatggtgtcttctgcttctattgataaagcacaaaaacaaagtgatagtagcttaaataatgaaataaactttcaaaagaacgaaaatgcggcaactatatctactgttgtttccgatcaacagacaaagaatgaatctaccactgatgctatttgcaatcaagttgatgaacaaaagggtgaaaaagtgcatgataatcaggaagatgtgcgaaaaattgatactaatgaccagtcttcttcagtagaaaaatcaagtaaagttgacatacaacagaaaccaggaagtgaagctcaatatggagtattattaacagcacatccagaagagccatttgattccaataatgttattccaatgccaaaattggaaccagtatcaagtaatcctaaacataagtataagtttccacatcgtccaaaaattaatgttgaaaagaataagtctaagattaggaatgtgtttgataaagtggttcaattttcaaatgaaaatagtggttatcaaccacctaaaaaggataaattaaagatacaagaacaaaacagattggttgaacagattgaagttgcaaaagcagaaaatattcatgaacatcaacttcatcctccaccattaaaggtagaaccatatgtatctcatggtgctactacgaccttgcctgtacaacagaatttggatcatttccctaacggaacagttcccacaacaggtgcaatcttttcccaaaatcaagatgatagagttaatcaagggatttcaaatgaaaatgtgacaaattcttctagtttatttagtaattcaaaaggacaacttgttgattcagctacaccaactgaagatgttttgttacagcaagaacaatctatcaaaaacaataccaatatgccaatgacttctgcaagtatcactaatatttctacagatagtaaaccaaaaattacaaaaattacctcacgtacattttccaagaagagtaaatctaaatttttcacaggactttttaagagatcaaagtaaacaaactgttatttattgatgcaaggttattaatacatgacatagtcaattgtattgttaaatattactgatacttttgggttgttcggaggttttctgttactattgtttttactgatttaagattcttatatgaaattttcgtatggaagagagtggatatcgtagaaatatattatattttatttatttctatataattagtaatactataatagagatgtgttaagtgtattaatttttgttctgtttctagtatctttgaaatatcgcatcatataactattgtgttcattatattgttttataaaatacaatgaagtattataacctagtatatttacatatatatatatgtatgaacagatatggatcattttgattctactatagtctttaaagtgtctacatcaaacattttagatccatcttttagaacattggccagtaatactaatgatttattagtgaaatcgggtgcatttcttaaagaattaatatcatcaccgtaattttgaaacaacattcctaggtattcattttgtagatcagcacttataggtttattcaaagttttatttatattggtagtggcttcttttaatgtttcttctactttttttaaatctgtattatgattatcatacttatggttttgattcgatctttctgttaattctgtaatagtataaggtatattagatagcttttccttggtgtcttggtaaagtaattctttgttatattgagatttcttaggaagttcatcgtctgataattcaatatctgataaggattggtccactatttgttcattattagtattaataccatttgtatcatgaccatcatccacttgaacatcattgtctgaggacgaggatgaagaatcagaatcagaggaatcagaaatatcggtagttcttcttttcttttttcttctagacttcttattgctcttacttttaattaaatttgcctcacctagggacattttgtactttgtctttttgtataaattcaatttatctttgggtatatatctctatataattttttattgaattgattctttatggactggattctagatttcagattaatatgccatattattttcttttttatctcatcacatcaaattttttttcactaatataaaaaatggcataaatgaagcaagccaaaaaagcactaatacaatattataaaaaaaataataactaaaatctttagcgtctcttgtaaattccctacatctattatacaaaatataatcaccgtaactggatccatatgatatctatttagctatctagttgaagatatatatctttatgtatatgttctttgattatggtaaaatgatatttgttgtttaggataataatttatccatttgaaccaaggcataatctaaaatataactttgctctactaagttatctatacgggcaaaatgtctttgtgtatatggaataataccatctataattttaatcatcccctgtatttcagttaactcagaaatattatggtgtaacattatgcaccttatagtcttttgagcaatgatatgagtctttgcattggtattccaatctctacatcttttcattagtaataacaattgatctgcatttaaagtagatatcacctgatctaattgtttattaaaaacaatggtattatcattattatcttcctcacaaatgtagtctaaggactgttttaaaacattgaataatctcattggatggtctaatgtaatggctaataaaaaagcattggtccaatcttcatttgctatatagttttgtaaagattgttcttgttcaacttttagtttttctttttcaatatctaattctttttgttcttctgtataatctctccagaattggaatataccatcagcatcagcagttactattaaattaccatcgtctaagactgataaagcccaaattctattactatgaccatctaaagttgtcatacattcaccattcgagcaatcccaaattttaacaagaccatcagcaccagtgcttactaattgtttttgtttattaataaaacaacatctttgaactgcattggtatgtccttctagagtttttaaaacagaatatgtatctaaagaccatatcttaatagttttatcactagagcatgtagctaaaattttgtcaaattgacaaaaagaaacatcccataaaccacgtctatggttagctagtgtggcctttaattcaccagtatcaagatcccagattttacaggttttatcatatgatgctgtagcgaaaatagaatcatttggtgatatggataatgcatttatatccttttcatgggcacgacgagtatattcggacgatcttaatgtgtgtatcttatcgttaatagatgcaggccctgttggtttaggtattgaccacttcttaatagttaaatcattcgatgcagttaataaatattcaggccaattttttaaagttacatttggtaatccaatcgcagtaactgaagcagaatgacctataaatttagcatatggttgaaatttgttggtctctaaattgtatctccacacaatagctgtattatctttagatgcagtggccaaccatactccatcttctgtagaatcaaccgcgttaagtaaatcttcatgaccttcatacatttcaacatcaattggtaaatggtcttcattcatgtcattgggaataggaattactcttaaagtgggagaattggttgctaatgccaacttattcaaattggaacctacaaatttcatatctgcaattgtaccatggttaccagcaatagaattagagaaagcaaattccattttattgttctctaatttgaatatggattcaatattgaagaaatgtaaggattgatcagaaaatacagcatacagttcagagcctttatttatcaaaagaacaccgattataaacaattcttcaatgggttgtttgctttttctcactatagcgccattgtccaaggaaataaattgtaaaactgcatttccaccggcagtatagacaatatttcttaaactatcaacgttaatgaagccacaagcttcaacctgttggtgtgcaggtatggtctttaaaagagtacattttttcttagtatttagttcccacaagttaataatatcatctctaccaccagagatcatttctaataaatcactgtcttcagattttaaacgaatgtcaatacctctaacagcagagttatgttcttgaactgtataaatacactttctctttacaaggtcccaaattttgatgacaccatttgtatcacctgagcataataaccatgtgttgctatgaatttcaccatagaactttaaactagagatagtaccaccgtgacctttgaaagaatgggtaatatatccattttcaatatcaacaattataattgcaccatcagtaccaccaactgccaccaatgtggaggttaggtcggagtccatgatatatgaaggggaggaaattttcatagatctcatgattttaccagttcctatatcagcaatttttagtaattgtgcttgagacacgtagcataaatatttaccatctggagttaactttaaagcagtaatttcttgttcatcatcatttgatattgtaaccagtttcttttgtgatggttttagttgaacaatattaatttcatctaaaattggagttgccaaaagtgttccatcctcactaatagtagcgatagcactactacctgcataaataggatctaattcagtatttttgaaacttgttttaaaactcattataatttgacttacttctgcttcactatttcttaatgttattttccctcaacaatattttcaaaaacaaaaaataccttgataactatctaatgtgaaccttatcattaatgatgaagagtatgtatccagcctacttgtaaaaatgagatgagatgagatgagatgctcatcattaattcatactatttttcttaaacattttcatttggactgtaaaaaatttatggtcattttccacgaaattcaatatttttaaaggattataaagcggtactaaaaaatgatccttctaaaatggtaatggtcattgttctttgtgacattatatctactcttagtcattattcatatacaaaatcttttaaaggcttctatcctaagacactaaaccaaataataaaaataagaagtgtttaatggaatctatatgctaattttaatgaataaaaaaaataatatataaaagtaataatagtaagaggaacaactatccataaaagtcaatcctatataattagagggtattagtaaaaactcagtcaattcactatttttttagtacattgtctaatgatgccttacaagaaaagctgtatgacatcataattgggaaaatcaatttgaatgcaaatcctaaatctatatcaatgtaagaaaaaaagatagatggcaccacagtaaacagaagtaataagaagtgatttcaattatatataagcaaatgaatagttaagccatttctaactattgaagcacttcattaagctcaaatccattggtgctattattatttggattaattatgttttcaatatctgcaatagccgattcactaaataaaccgtttttagtaaatctcatattctctgcaaccgcttctgccatactttgtctacgttgtttccataaagatttgttattaaaatctccaaaatcaacaggtgcagttaatgaggctaaaatatcggcatctgcatcatttattatgacaccttcatgatcatccatgacatctggataatccaatacaatattatgatcatctaataaattgtcatcacttttgcttaagatctgatggatttcgtcaatgccaacactcttgattgagtcttttctggaatcagtgttactatcagaaaataccatgttattagaatctatgagatgtatgtcttcgatcttatttgatgtttgttcattggaattattaacaagagtctgtatatttttagaatcagcacttgacacatcacctaataatgctttttctttttccatacgagctctttctcttttcagtttttgaatttttcttttcttttttaattttcttttcttttcatttcttcttctttgtagttcttttatcttatctagttttcttctagtcttttcaactccaatatagccgatgggtatctttttagtagagagatttggaatcatatattcagtagtgtcattgtaatcaattcccttgtttctaaatgcggacagtggaatttttggtttattataccattcagttataagagatgattggtatgaatttttattatcaccttcttcatcttctaattcactcatgtttagcaattcattcaatgtcatttcttctcctgcagaattattctcttccttgttaacaacattatttgtaccttgtgcttcatgtttttgattagaatcatttaattgttgatgtgcctgaattaaggaatgcaaagatttggttgataacccatcgataatactaaacggtttattatcggtttcccaagtacctaatttcggtggctttaagccaacaacattggcacttacaatctctttgggtttggtgaaagtgagtttgttccttgtagttggtgatggaagattatcatcttcatctgtagattcatcatcggggtatattactgtctcactaatattatcttcattatgatggtaattataaatattactgtctgaagaagaaatatcatcataatgaaaataaaatgaatcaggatccaaatcgtcaatatctataaaaatgtttgtaacactactatcatagccatagtcgtcatcttcttcatccattgaaccatcagaatactctgtagaaaaatatgatccatccttattatgtgcacttttagaatgtttcccaggattatttcctaaattttcttgtgaatcatcttcttccccctcaccatcttcatcagtggttggtaggtgagcaatatctaataaaatattgtcatattcatcatcagaagtatctattaatgcagaagaactcaactgtttcaaagatttatccatgtttattctgttctttaaagttccactgtggccattattttttgaatcttcattctcgtcactatcactacggaaaaaaacaccaaagatatattcgtcccctgagacattagctgtcttttttactctttcccttaacaacttccttgacctcaatctttctctcaattcacgtttcttagcctctcttctctgatgtttggattcttttttatcatttgatattaatggtaaatcagtatttaaatttaattttggctctgaattatctgcataataatatagactagagaattttggatcttcataaaacggtatatcaaaatcagacataatttcatcttcgtcgtcgtcatcaaagtcattatgagaattgttgttatcatgatcattttcatgataagaatcattatccaacatgggactatctaaatctgcagaatcagatggattttcatgaatactaccatcaaaagataaagaatcatcattttgtaaatcagccactatttgttgttcttcttcgtgaagaatgggcagctcatcgtcagaggtgtctagacctgtttgaatttcacctgcagtatcattattatccattacaacatcgaaatatgcatcttggtctatatcataatcagattcctcagattcagaaaattttggcacatgcatctcatctacctgattcttaataaatgaagatgcatttgaatctttatttattttatcgtctttgtcggatatttcttcaccaatatcttcttcttctttgttgtcatcttgattatcactagtagtagaaagattattcgattgtgaatatgtgatacctggtttattcttaccggagggatgaatcaaatgctctgtttgtttcatgctattactgttcatatcatttgactcagtaggcgtggagtgggtagtgttacttattggcatattagaaaaggcagtcgttggattctttttggcaggggttttacctcttttcattgcatttaacgcttgcatggctcttttttctttgaactgttaatttaacaaaatcaatggtttcgtcatctgagcttgtttcactatcatcatcatcttcgtcttcatcatcatcatcttcttcttcttcttcactagatacatcgtcatcgtctgtggcataattagaatattcggtgtctgttgagttgcttttggtattattatatgttaattgtgaaattttctttgaactgttttctataagtttactttttttaccagttgaattattagatatcattttacctttcatagctgtactactgtgattagtatttttattactatttttattactattatcatttctgttattatcgtcaccaatgtgattatcttcagtagagttgttattatttgtcggaatagaagaactaccattcatttctacatcacttaaaggagattcatctgaactatatataagactaaatcgtcttggcctactaatcggtaacttattagatgatattttagtatttgattgtgttgtattagtggtgatagttgtttttgatgtggctagaattgacggttgtttcttggttggagaagtggataagaccacattttttctaggactcttttgacttaccatagagcactcaaatatatttaatgtgtgtgtgcgaatgtgtttgtatacaaagaatataaactaattaattaaatgcctaattggtaaataagtaaataagtaaataaataaataaagatcaatgatagattaaaatagaagtagaagtaggtgcaatgtaatatctatatgaaatggatcaaaatgatgattatcgttattattccttttcttggttaatttttaattcagtatggttttatttttttatatttttatcttatgacctagacagagaagtttatgaaggtatgaaggaatatatacgtgtataagtatatttgtttaatgaatacaaacttacttctttttttgattggttttatttatctctatatcatctttaaatttttcaaaccaggaaatttctttttaattttttttccttttgtttgcaggtcttctaaagctcatcgacaaaataaactaaaaatttttcttttctccaaaaaaataaaaaaaagaaagaaaaaaaaagggggtcgaggaaatatagaagaggaattattttaaacctaagttaagagaagagaataagggaaaaaagaataaaaaacttaataaccctgaattataaaaagaaatgaaaacaagagagcaaaaaaaggagagcaaaaaacgcataaataaagaaaacaaaccgattttcttgaaatttcagttgtttagatggtaaacccttatggttatttgtcaggtaaaatgaaaaaggtaggtaaacctctaaaaaagcaaataaataaatactcttgaaataaactatttaaatgcaaaataatattaaacatttagttaaggtaataacatggtactgtgatacaagcctgaaatcattgtaaggcatgtcttcattttatctggaagtaagaaactacgtttctccactcttaagttttaatgatttttcggaacaattgtttttacaaagagtagtaacaacttaagtatacctataacatgaattattcagtatttttttataatgtttgttataatttgattcaataaatacatagttttgttcccttatttttgacaccaaggtaataatattcttggcaaattttcttgagtttttttattagaagaatttactaaaactttaagtgttgaataaaaaatcatagatgagattttatattgtatgtcgtttgtactttttgactttttttagtagaagagataaggaatagattgaggttaactcgagtttaataaaatagtcttttttttaacaaaacagggtaatttagttgaaaaccccaaaatattattatatacagtatattcagaagtttgtatagctttatcattggaagaagataaagtattaaattctgttaaattaatatttataaagtcttcgaattgttgctgacttacagtgtataaattcacgtttatatatatatatatatatagttagaaaggaaaaagtttttaatagtagttttaggttaatatttaaacaaaaaattaatagatgattccaaatgtttttaaaacggaacaatactacataattcatttttctaaaaggataaagaagttaaaatttttccataacattattgtgttcagagttagcacttgtatgtgtcgagtaaaatggataaatcttacttatattctataattcatctgtggttaatggtattcgaatttgaagaaaaaatttttatttgttttctctaaacattgtaaagaaataataatatattagtgaaaaaggccctaaaattcttgtatatgcgctttttttaataaaaaatcaaactaagaatatgtttttaaagaggaaatgatttttcaaacaaaaaaaattgtttcaaatattattctaaaatatacacattaattatatataaacacatacaagttatacaactgttgattctaaaataataaattaattatagcattcatattgtattttattcttattatagattaatctattagatagaacctaatagatgtaataaaaataataatgcaaatagttacctctgaaacatacacatacaataatcagagatctgttaaatgtgttttttaataatatgtcactagcatgataattttttgaatatatctacagctcaagtgcagaggcttaaccattgcaaaatttatgctttaatatctaatatcactcaagaaaatatgcatttcatggtttttaactaggatttttacagtttacatttaaagaagttaatctaaattaactaatttctaaaattttatattcttttcaataacagatcaagattagaaaatatatactaaaaagactattacttgccatctcaggagaaatttaactaccaaacaaattggtttatttatttttattttttaagttttgtttttgtacaaatcttcctagcactaaacatattactatatttataatacatttatataactctttatgaaatgagtaagtgacaaccattacatggaaaggataaagaataacgagcaaggaataaaataataggatttagtaactttctaatataaacaatagaaaacaaaggtagatagaaagatagaaaaaaagtgtatatctgtgaaatcaaagttattattgttgaaatagaatgttctataatgaaataaatagaacaataagattctagcagacactaaacaataaattgttgagtaataattgttgagaagtcaccaaaagttgttgagtttgtttattaaatatcttactgttcgtagaggaaaatggcttaatgttagcatatataaagccaaggatttcatcatacattatttttatcttatttacaatctttgtatattattatttttatgttgtatatagagaaagaaagtgaagaactttatcataattttgtgtactaaatctgttttaatataatattgagaatgtttactatatatccaatgaatacaggcgctcattctcaacaattattgttttatttttataaaacttcttcttattgtaagcttccacattattttatacacttatttgtttgtttgttttcattgccttaatttttttttatttttttttctactttcaattccgttcggagtttttattttcgtttttccctcaaatttccttatatatatattttatctatttttacatatgttgcatagttgaatagttaaggtaatactgtagcaggaggaaatagagatacattctcgatccgaatttcttgaaagaatataatctttaattagagtactataagaataagtacaatttttaaactattccatcatttggaaagggaaatatatacaatgaccaattttctgtctttacctgatgaacttttattttgttggttgagctattgtgataacagaaatctaagattaattaacagaagaatatacttggttagaaataattggttcaaacataaagttttaaacttggttcctttaaatcactcaatttggaattcttcttgttttttatttgtgttggtgtcttacattaaagaatttgattcaattagattatattccagaaaattattgttttcatcaacgttgagtttatatagccaaaataatttgagttttagttccatagagacaatggaatatatttgtgattcatgggaaattatttacagtcttttggtaaggcccatctcaatatttaactatgctgctagtagtaataattttatattaccaatgaataatttttgtaggaatcggttaaattcaaatagatatggtctatttactattccatttaatgtttggatatgtgttaaagatataaactatgccagatacataaacaaagttgtcgttcaattaaaatcatatggaaccaataaagtggacacttatttttttgtaagttatctgcatgagcttattaaagaacctggtgtttattgtgctaaaattggggatatttcatacaaatttttgaggtctcaacatgttaaaagtaatgaagcaaaatcgttgaacttgttttccccagttaatgttcattattacgttaacactgaaaatagagatatctttaatgacaaattgaaagttttaggttacagctttgatgattttaactcttattatgaattactctattttaaagtgccattagaagctgagaattttgtaataaataaatggggaactctttttagtagtatatttgcagcatatttattaaataataataatctttgcgatatagcctatccacataataaaccagatgcactgctaatgaatgataatgatagtgagcatataaataacaatattacattttcattagagtgtcttggtaatacacaacaaaagaaacatatgccaaacagatacataaaagatttgagattacccaaattaatcgaagtttggaaagaatgaattaattagggttgtgaaacacataacttgagttttaaaagtaatcaatttctattaattcagggttgaatactatttctcttttcctttttcttttcttttttgaagaatcactttcaacgggtctttgagaatgcaccttttggaatgaattattagaatgttccagtaaagcctaaatatttagtaaaagatactagcatttaaaaggaaggtaggtggataaatatacaaccaattgtgggtgtacttgtaaataaacaagtttgttaaatagtactacaaatatttatttacggctattaactttttactactttgtcccatactatataatattttcttctccacaagtcctaattacttaagatcagaacgccaaatatctgtaatggagtctaaaagtatggaaaatggcacatcctcctcacagttacaaactcaaataactaacttttcagagtctcccacagttccagctaagcaacaacagaaatttaacgcaagacaattttggccggatataataaagactccggcaaatcaatggatattcacttgtaaagagattattgatcgattgaatacaattaatgaaaaacaaaatattccaatcaatgaaactgaaaagattatggaaaaatgtctgttatatttttatactctgaagaaaaagttgaatttgttcgatcacacttatactgcctcaagtattctattcttcaggttttggtatattaatgggttgccaagcaatttattaacttgtattcatatatcacaagctattctagtaactgcttgtaaaacaacagaaaataatagaccattagatgcctatgtgaaggccacttgtgaatttttgttccaaactatacccaatttgaaacaaaggtttaatatggataaattaaaatgggaagtaaaggataaattaattgaaaatgagaaaagaatactttgtatatttggttttgatttgaatattgacaacccaaaagaaattattgaagatatgtttagtggatactataggtataatagagattatgatttgccacaagagtttatgaaaatatttcctaaacttttacaagaagcaagaaattttattattcaggctgtgacacaaccaatatcattgttatgtgatggatatacatttgttgctctatcgttactatactgtggtttacaatataaagaaaaagtagataatgaatttagatatccaaaaaatttctttcaaggaagattacatatattcattgatccagaaaagtttcagaatcttttcacagattatagaatactagaagagaatttttttgatttgaaaagtaataaaggcaataaattacaaattaaaaaagaaacaattttgtcagtaatagatgaagatgcgaagcagaatgaaaatgaaaaaactaacaataacgcggaaatcagtttacatttatactctcaaaattatgaaagtattaagtcgggtgaagttactaatgaattattagagtatcttgatactagagtgaatgagttagaagaaaagacaatcttagataaccaaaaacgttcttctaatgatacattaaatgaagaagtcatcattagtaaaaaaatgaaaatataatattaaactatttattttttgtagaattagatgatgaaagaaatacttattataaaaagaagttaagtttggatacatttaaaatttaatgatatttattaatacacataaacaatttgaatcaaaactattatacttttgaatatacgggttagattttatctagattttgaaactctctcgtatatttcaagaagttcagagttcaacttattattgtagtttttgatataatattcagcccagtcatcaaaccatttataaccagaagtgtaatctgtctttttatctttcttttttgtactgttgtgtctttgccacacatggatgtgttttaatctaatatgaaactgctccttttctgagttatgatttgtgaaagtatctaccattattaactttccattactgtgtgttatcaaaaattgaggcaacgatccagtaattttacctgcattaagccttattatagtgtcttcatttactttttgacagacaagtgcagcaaattcgatacactctttttctagttggacaagagccacattttgataatggggaaaccgatttaaataatataaataaagagaatagaaaaaatataatatacttacctggacatctccatgtaaagtaatgtacttaatgagatttcttatcgtggttatgatacttggatcctcaaaaagtttggaattcattactacaatagtcttttcaattatatctactaaagaatttcgatttacttttaatgcaagtctaaaatatttctgtgtgtctgctacttcatattcttttaaactacattctaaagtagtaatgaagtactgtaattctgttaaaacttctaacactttgtttactttgtacttttcaggtaatgttgtggacttggatgtgtctgaaaaatccttaaatgatcttataataccatatagtaaactctctgaaataattttttcatctaaaacactttttttatcttcctttaacttcatccattcaaaacttccattttcacaataatcttttaaaaaacaatgtgcacagtatatattacaaaataattcaatatcattcattgtatttaaattgactttgatgttcttatgatggttatattgtttctctaagtaatatagtaatttaagacaccatctaaaggagtcaaacgctttcgtataatttttctgataaaaatagtcacatcccatgaagcatttagtaagtaagataaatataattttttcttggtttgttttcaatttacgagctagccattttgcttttaaaccaaaagtgaaattgaaatatttgagtaatagatttttagaactgtttacaatatcaatactagggtgataaaatatctgagaaattatttctttcggaggtaaatataatatcaaactaaatatgtcgataagcccttttattgaagcttccttagtggaaaaatctttgaaaattgatgctaattttatattacaggtgtctatccaatcctcataattgttcgacatttgtctctatagttgtttggttcaatcattgtattttgtggtatttagagagtttgtgacgtttaaatttcccaatatgattaataaatttttacggtgacaaacgtgtttactttttcatcttttctgaaaaatcaaaaggaaaaacggattgtctttgtgaatatctaactatacttgagaattttgttatagatcacgagaataatataaaagcagtcattatataaaaaaagttacttctcaataaaaaaaggaatagatacaactttatataatatcaaagaacagaaataaaagatcaaaataaattctatatgctattattacataaattcagataaatttgtggttgtcattgagggtaaaccacctcctaagaaatcaagcatcatatgcataccaccacctccactgtattcgtcaacatcttgtggcaacacctgagacacaccttctaagaaccatacacgatctttaacttcggttgtaaacccatgcaacatcttgtagtaagatctcataattctcatcgcatcaatatcaccagtcataagaagtgctaaaaatgttctatctaataaagcagggaaagcaaagactcttaaaagaaagtccaactggttcttttcgcgatgcaattgatctaaatatgccagagttattaaatatggcgaatctatctctacagggtaaagatcagatatgctttcatcaaaacaaactaactcagaaatagttctattttcctggcttaagacgtcacttagatcacttaaatttactgaaatcaagttatagaatttagaagattctgctaatggccatactgcagttagaatagtaacagcacctttgacatgaaaaatccatgcagatgtattagagtcacttgatgtcgtggtattggaagcatttgctaatgaatccattataagaattagagatgatgcaaccagtgcatcagtattttcttctgatatttccagaacagcttctcttaataattttaaagcttctagtctatgagacgagacatactgttctaaacctgtttcagttcttgataaatgagaggcactaaatgctaaaatagtatgcataaggaatggatagtcaaatgctagatttggaatatatgtttcccaaacctccggtccagatatcccagcagcagtaattgttttccatactatggtacaataatgatgaaacagtttaatatccactaaatttaattttgcaatcgttgatagttcaattaatttggatatagtattcagagatgaggggctctgctctccagacgatgagttcataggactattagatttagtaatttgtaattcgttgctattgatgctatgtgtactgctactgttacttatggaataatcaatttgagaatctctcaatttcgaatttatatcatcatttttattattggtattaatactagaaggaatgttatttttttcagtggatgggtttgatacatttgataaagtggtttcatctaatatgtttttaattggatttatacgattcccttctatactaggcgaaactttactattatggctttctttattagtattactctcattatttctcgatgtaatttggtgttgttcctcctgttgctgttgcatgttagccaatgccacctctgcattattagcctttaaagacctattattattgttgttatttggtctgttattgttcttaccaaacgttagtaaatcaacattaccatttagaagtacattattattcccactaaaaaaactcatcagtgttgaggagatattattgatatttttggaattagctaaattttgtaattcagcattaaaataattttgttcatatccagacactatatttatattatttaaaggcatagtatgattgttgagattgttgctggtattattattgccattatttgacgaaccagtcacaggtaatacattaggaagactattcaatgatttgtaaatattatttgtcgatggtgtcaatgtattcatagaattagaattaaatttatttggtgaaaaactgttattcaaccccccaggcattggtattcctaaagattgatcactgggctttggagttaaacttaatgacgtattggaccaaatattattattgctgttcatgttagttggatttgatgacattttatcgattgatgaagtgatgtgcgtttctaggttaggtataaccgggctgttggcaacaagtggtggtaataaaataccttcttgaacagagggtatgttgaagttattattgttattgttagtaatagtagttttgggtaaattttgaggctcaggggtattttcttttttattcatcatagaagaatttatttgagacagtagtattgcttgttgttgttgaagaaattgtaactgctgcagttttttcatataatctgttgcagatggatcagataaactatttatttctttttgtgaaggcagtgtagcagttgcaggggtggttgtgttggcaacagcagcagtggtagtagtactggtgatggtggtaggtattgtatggtttgaatcaagtattggttgatgaagttgtgtttctgatttaataccagtaggattacataatggtctagtctcaggggtagaagtattatccgtagtggatggagtctttatggtacgttttctcttttttcttggttgtggtggagaataaacacaagttaaccccatattttgacattttttacatcctggtttggtttcgtcacatttcactctacgtcttttacagttatcacagccaaacttagacttattgtggaattttctcttacctgttgatgttttagacacttttttcccgcctatatctattagttctacaggtttaaccattgttaacttatatttgttgtttgtttttctatatataggtacgtggtctttttttttctttctttttgatggtaaacttaattttgatcaataatattgcttaatcttaacttgtgttttattttgtatgatctaaaggaagaacgaagtttaattattttatgaaagataactcgattagttaaaaaatatttcaatgaatttaatattccatgtcttccattcgccttaaagtaaagaagatagatatataaagaggtaaactataatttaaatgagaaggaaaggatgaaaataaattaattattctttttttattttttttttagcgtattttaacagattgtattcttattaataataaattcacctaagtataaaaaagcggttgttgaaaccaatgttttgtatttattacaatagtagatgataatacacaatagtattattaattggtgttggatttatagataaatgaatggctctatattttgttgttgttgtttttttctgatgtaatcaatgacaaggatattgtattaaaatattctttcagctaagcctggcgaaaaaggagttaaaggtaaagtaaaaaaaaaaaaaaaaaaagaaaaaagatcttcaacctttctgttttgttaacaaatctatggttatttccatggcaacatgtgaacaattttgaataagttggttttaattattaccactaggtcggaaagttgcgatggtgtttgtggtgaatgtggcatctgtgatgagcaataatagtgaaaaattatgcagaacaaaaaaaaatatcaaaagagaaaaaaggtttttttaaaaaaaaaaacaaaacaaaaacaaaagcaaagggcattatttaaacgagcttaaaaagaataaaaataggtttgtacgaagttgtataaaagtaataagatatctttagggtttactgggaatggatgattatattgctcatttctactaagtttttgatagatcttacttttgtttctggggatttgaagttatatactatagatatgtatatattagaaatggaatgttttctagaagtacatacttgtttaaacataaaaatacctatatcaatagtgtataaatctatttttctatgtggttcgattaaattaaattgcttaacaaaaaaaaagaatcgaaggcacatatagacacctttgttgactactatgcagagtctcttttttttcagggttggtcttaacaaaatcaaactcatattttttttccttttttttttcaggttaaaaaaacatcacaactccacatcaaaaatttttcttttcttttttgaatgtgatttcttgaaatcgtttagtggtttttttatttttttggtttgtctttatctgttttttttattgtcattgttgtacttttttttgcgattttttttgtttgctttgtttcgtggtgtaaaaaaaggattgaaaataacaatataaatggcaattaaacgaaaaaaatcggacaatagtaatagggttattcgtttgtaggttgacatatttttcgtttaaagcacatagagatagtaactgcaataaaatagtacacttcatctaagattggtgtaataaatagttcctttatagactaaaaatcaaaaaaaaaaagttattgcagtgtggttgtaagtgttaaagaacaaaggtttgcttcttcatggttacttactaaaatacatctaacttttgtatagttatctttcgctctgattctaaaaattataataaaaaacctaaacacctaattttaaaagttaaaaaaaagtaaatgaaacgagaggatcctaaaagtagtttttcctaaaaccatagtattttggaaatttttattagatctctattgaatcttcttctccaaaagatttgtaaaccctaatttgggaaaaccatggaattgaaaatttgttacaaaaatctttgttagtctggaggtgatgcgcaaaagggaaatagaattattaatggaatatctttgtccttctttttctttcagtttctatacttataaggttgctgaacataaatatcatgaaaaaagaatatttttataagtactctgaaagaaatgtctcttttattttgttagttaactcctcttttatcttgatcagccaatatttatactgtataagacgagccccctcaatttattcttgagtataaggaagaagttttatactccagtgagtaaataaaacagacatatattttaatcaaataataataatggtatacatcagttgtatattctctctggttcattctctatcactcagcttgttaatccttacatacacatacatagtttagagaagcttgtatgtacttttgaaatgttttttcaattcttaagttctttttttttttgaacatagtgtaatcttttgttacagtatgtaaagctataacttttttattatttattaaaaaatctagaagtaataacaatcaaacagatttagtaaatatttgaaagtaactaaatagtttttcaatacaaatggttcatcctcagcaaataattcaaaattaaaacggatttgtgtagagctatttttttgtttgtcaacagcatgataaagagttctctttaataaatttggaaatgatgttgcaatatttttcgtacttgttaaacaaagcattatatgaagggttggtcttcaaaggtgcacagaagttatgcataattaaattaaacttagaagttagaggactatcttaaaaaaaaaaagctgataccttattcgtgttgtaagatatttgttagaaaatgtgtaatatattctcaataattttttttattaaagattgtttttaataaattattggtatttttttaaagaagcaagatattttagaaaaataaaaaaaaaaattgagattaatctttacctgattataagcatggcatatatattattaggtatattcttagataatttcttgttgacgcaaaacttcggaatcaaaaattctattagagttcattttagattaatataataagataatataacttacaaaaggatatcggtgacatcataagttttttgggtatttatagcagaaggttagtggtactataaattgtaattttattgcttggttttcttttttttatataactcttggaaagtagtagcatttgtatttattgtagtcatgacttaacttattagtaaattggatctcgggtttgttaaaaacctataaaaaacaatgtatataattatataacatgattatgcataaatataaattgatctctcttcttttgattctcttcttaaattttttcttcttgaaaaatatttttcttttctaattatcattattaacgacacaataaaacagtttttaataaagaaaccgaacagatatactgtctatgttttaacaaaaacaatagataattctagattcactcagaatattatataattttgatggtaataacatctttattttacgacattcttgaaaatgctcgtgtagctcagtggttagagcttcgtgcttatagtgattctgtctgccgcgtggaatttctatgcctatgggagttagaggttctctcatgataagcgacgcgaccgtcgtgggttcaatccccacctcgagcactttctttttacttttttttgcgtgaaaaatatgacatagccaactgttatgttactatagacgatcttataatctcttaagtcgataacgacattcgtattttttatctttacatatacagtatatatatttagataaacagtttttcatatctagtgtagttcatctgtaatttacttaatgtgataagtttacagtttcgagattttgctaacagtttactttggaaatatatttatattgataaaataaagaaaatacatatacaatgtagatgcgccttatagtgttaggtgtaacattaacttgtagttggaccagtatagctataagtaactaaataacatgccctatctacgcaattatctttgttgattactgctaccatatatattcacttttttttttttataatttcttatatttcaatcataaaggtttgtttaaaaattcttttctaaactaataattagaagtctaaacatcaatatatcatggccactacatcctaaagcattaacagccgttctactttttaacactcatttatatgaattttctgtttttgacatattgtaaaatattttggaattatgggtaagctaataattagatatttaacaattcatctttaacacagcttacttcttcattatttcaaagatttccctttgtggtaagttctgttatttcatttaatgatcttgttgaatgaaatacttatgttaaatttagtttaaatctttcgtgagtgatgataggtcaatttaagaaatttgatatttaagaaagttcaatcaatggatcttaatgttatatatggggcttgtattgatgcacttcagaaaagcagagagagatcaactattgatatatacagcataatactacaaatatactattataaaactacaataggcgacacaatagtataaaatgaacaaaaatgaatgaaggatcatcggaaattgaaaagttgcaaaaaatgtgaaaattttaaaaatcttttatgatgttgtagaaacaaaataattaaaatatgaattacatatattgatacaggagaaaaagagataaagagaaagagcgaaactgtgattgactaccatatttaataaaaaccttttttttttttttgttggttctatttgtattttgtaaagttagaaaataatgatacagatcaaagaaagtaaaaagaaaaaaaagttaatcgttcttttagctttatttcattagtgtaataaaataataccttggtttataaaaaagctcaagaaaagaaaggaaagacaaagctaaaacaaattttaaagatgcctattgatcatgctaaattagcaaaattacaaaagctatcatccgcaaataaggttggtggtaccagaagaaaacagactaagaagacacatttatttccggatgaaccaaaattaatgaatcaaatgcataaaatgggtggggtcacaatcagtgatattgcagaagccaatttttttcaagaagatggtaatgttttgcattttgacaaattagaaaaatttgaagttgctccaaaatataatgtttctgctatctatggtaaaggcgaattaaaacgtttagatgatatgtttcaagatgttttaccgcaattaggttctgaagcatattttgctctatctcaactggatgctaagattaaagaattcgaggaagctaaaaagattgaggaagcgcaaaagaaaaaataaatatatatatataaatcaaattattcggatttaaatcttttttcttactttttattcccttctatgtcaaataacaaattttctaaacatatacctagatctatataagcaccagatatgttgatattgaatgaaatatattaaatatgatttttactaaccggttaattattaattggtttatatctagtagcataataatattgataactatatacttataccatctctatgtgctctagctatatattcttcatatttgtcgccgagggcctctttcaatttttttctatttctatcacaggtcaacgtattaccatgtcttttcaaagcatcttttcttgcaaaacctttcccacatctcgagcaaatatgtggtaatataagcaaatggcctttttcatgtcgttttaactcagacattttggtaaatactaattcacacttattacaatagaatttttcttcaggcggtttttctgtctttcttctacgacccaatttttgtgtagaacgggcaagattttcagataatatttgagagtctattggtgtgttatttatttgcggaatattgtcattaagaacagaaggaatgctaataggtttaaaattcatcgcatccatcattgtttgattaggaatgacatatttaaatttttcttgcatggcactattagctacagaaaacgatgatgacatggcagttggagctggagaaaggggcgatatattacttatattatttgcatcattattactactactcttactcttattattattgttagtattgccattaagtgaatagctaattatattttgatttgaactagttggtttcattctttctaataattcccgtatagttggattgacactagatatttcttctgatgtagacactaaagcatctatggcttgcctaataaatagtagttcttcggacattttgttcgtttagattatactatagtctttgggtgatcagttgtccagtttttattgactggtaatggttgattcctccaatatcacgaatcttttctccatactgtctccaaaatgcttaagctttaaatttcataaatgattaatgtttcataaatatatgaaaaaaatcaagtgtgtatttgattgatttcatagattgaaaaaagagtcatcgaacttttgtttctttttcatttcttgacaaagacccatacattcataaatgactaatattcgccttaacggaaaatatattccgtatttggtattctgctttccgttaatgataaaaaaaagtaatcctttggattcaaattaggataatttagtcaaatagtatatagcatgagataccaagacgaacaaaagtagatgatattgtctctcagttttcatagtagctgtgttgtatatggtataaatctatcgaaatgctactttttaacttaaaatgcatgcaaaatttattaaacattataaaactattattgaagtaaatagaaaacgtatcgttggacatttctaacaatgatttggtaaaaataaaaaataataactatgtaaagaatgtgtaatttaagattgaatacataaatcaacagtattttgaaatattatgttttattataaactttaaagttttattgtaagtacagttttcagttatggataatagtcttcacatttttaacataggaaataagaactaaaatgtaagaaatatagcaagttacagatattgtatatggagtaaataattttcaatttttgcagtttcatataacccttatttcatggattgagataagattaaatgttttaaaggctttcaaaaaaaccaatttctcattattccttatgcgaatcgaataatttctaagagtatcttatacatataatatcgaaagaatttgcataagagcttaatatttggtgattttaataaatgtagtgttttttcaaacacattcaaatattcgactactgccaggaaaattatgaaaatgaaaagtaattaaatattatgtcaaataaagataatatttgttgagttctattaaatatacagtttgttgagtagattacttataaattctaaataataggtatgagcatgatcgtttgtctgagagagaagcttttgtatcataactatacaagataattacgtgttcacgatatgtagtgagtcagtgaataagcttttcatctgaatgaatgtatatatatatatatatatgtacatatattttattatcatatttataaatatatatatgtatatataatatagaccaattactagttatacaaccttaaaataatccataactaactttcgacccataatattaaattgttcaatttcactgggtagaacataatcactgcttccttgattatatttattttgtattctatcttgtaaaatatcatcactatcacaatttgttgttgctggagaagaggaagcaatactagttatattttcttcctgtaaaataagtgatgcattattattgttattatgatgatggtggctatctgtgtggatattatgaatattattactatcatgttttgttatattagaatgactgtccatagttgaattcaaaactagtgatggattaatggtgttaatatggttatttgttgttgcagaaactgagaaagcaatagtattttcaaaaaatgatcctaagttattattattattatcatcatctgtttgagaatgtgctgatccatgaatctggtgcaatgacgtggtactagttattaaaggtgatgaagaagattcatctgaattaaacatattatttccagtttgattgttattgcgccggagtaatagtttctgccttctagtacgacgtaccacaactggtcttacaatagaacaacaattgattaactctttgacagatagaccagtaattcttgaatataactgataacatttctctctttcatgtatcatttcaccttcattagaaccagttgtgacattactcattataaatgcaacaacgattagtttgttcaaattaaatttcaaattccttagataattgaattcagcatcacagcactctaaaaatttgattataatacaacagatccttttaaattgagatatggtagcctgagatctttttaacattgtctctaaaaaatagatcaatttattatcatctatagcttctaatacttttgtagtactcaatccgatgttttcatctggtattaacagattaatatatttatacttgataccacgaataaattgtttaaccataaatttattcaattgagcagtttgttccttcaatgtatgaactatcattactgctgttaaaataaaagagaataagggagaatggaaaagaagtaatagggtggtaaatgtaagttgccgaacagaagaagagcaaggaaaagaatagaaacttagaaagtataggctgctaaaatatagttaagtgagcttagataaatatggattttttttcttgattgattattgctttttggtcttgtttatgtacggataactcttctgaaaactctagacaaaatgccaatattatcacttcaaaccgagaattgtgtgtaaaagttacatccattttctctcgcataggtaatgatccttacttataattgaatagtgtgggaaacattctgacgcttactaactgttctgtcttctcttcttactttcagaagatcattcttagtctgtcattccttcactcgttgcgtacaaagatgatgagtaaagagaaaaaaagaaacaaaacaaaataaaataaaaaaaaagaaacaggacaaaaaaccacgatatctggaattcatcaagaatttttacctcgagtaagttttattacttttattttcctctttagaatatactctacttaataaggaaaattgtcacctaaagaggaaagatcttaggaacataaaaagaaagtcgaggaaggaaggggttaagcttggatggagatgatggtaatgaagatagttcgacatgatattgagacgtctagacacaatacataaattgataaaagagaaataaagaggtagggaggagagtggaggcatctttgtaagtacatttctatgtttaaaggtatccagacttaattcaggaaaagtataactagtcgcacactagtaaatctagtatctatattgggagatagatacagatagaatttaagagacagtatttgaaggaataagaatgcttcatcatttgaaagcatgtcggcacatatataggtctattagatgggtttctacagataaaaaggcacattcatttcagcacactttaaatcttcctaaaacaacgtttcccacgagatcatccttagataaatgcttaaaagagttaataccacaatgttctgatacaacgtataagaaacaattaaatcaatttatttctgaaatagaaaagttaagggatccaaaagaaaaattcgaattttgtaaagataaattatttgtcttacatgatgggcctccgtatgctaatggtgatcttcatttgggtcacgccttaaataaaattttaaaagatataataaacaggtattatctattggaaaagtctcaatatattttttataaaccaggttgggattgtcatggtttaccaattgaattaaaagcattggacaaactacctgaaaaaatgtccaattctttgaaagatccaataaaaattagatctatagctgcgaagcacgcagatgatacccggaaaacacaaatggaacaatttaaagaatttgctatcatgactgactggaatgatccttatattacaatgagtaaggattatgaaattgatcaattgttgatatttaaaacatttttcaataagggattcataaaaagacgtaataaacctgtttattgggggactgttacaagaactgcattggctgaaagtgaattagaatacaatgaaaatcatgtttcaaaggcaatttatgtgaaatttcctttaactaaactttctacacaaacaattcttaagtctatattcgatacaccttctcaaatgttagataaaatcaaaacaattaaatgtatgatttggactactacaccctggaccttattttctaatagagctatatgttttaatgaatcatttaaatattgtttagtacatgacaattctgcaaatgattacctcattattgcgaaggatactttaaatactattcctatagatgattcagaatggtctattttggaaacatttgacgggaagcatttaaataatttatattattgtaatccactattggagaatgacaaggaatatccactattgcctggattacacgtcactaatactacaggtacagggttagtccacactgcaccagggcatggtgcagatgattatttagtagggtttaagaacaatttagagatattttctgctgtggattcatatggtaattatgatttaaatcagttccacaatccacaattaaagcaatttttagcagatccattggatacttcaaaaggtagaaatgtattagatgaagagacagttaatgtaataataaacagattatttgaattgaagatgttattttcgcaatctgattataaacactcttatccttatgactggagatctaaacgtcctgtaatcattcgatctaccccacaatggttcattaatttgactgatcttaaagatactgcatatgatgttgtacataaaaccaatttcattcctcaaagaggtagacatagattagaagcatttattaaaaatagaaacgagtggtgtatctcaaggcaaagagtctggggtgttccaattccttattttcaacataaagatgatccaagtattgttctaatgaatgacaaaatcatatctcatatcattcaaaagtttaaaattgaaggtaacactaactcttggtttgtttcagaggaaggagaagatataaaaaaatggttaccggaagattatcaacacctagcatctcaatatgtaaaaggtaaagacactatggatgtttggtttgactcgggaacatcctggtgtgtgattagaaatttttataaaaatactctaagattggataatatacctttgcccatgtcaaatatttatttagaaggtactgatcaacatcgtggttggtttcaaagttctttattaacctatatcgcagcaaatttaggagatatgaaacctgtagccccttttaggactatagttacacatggatttttttagatgaaaaaggtttgaagatgtctaaatctttgggtaacgtgatctcaccaaccgatataataaagggtaatcagaaacttaaactaccttctattgggattgatggattaagatattttgtagcacaaacagattttagcaacgatattacagcaagttcagtagttattaatcatgttgcggattctttgaaaagattaagattatcatttaaattcatacttggtaatttaaataaaagtgatgattatcaagttttgccatacgatcaattaaggcctattgataagtatacaattggtaaattatcacaattattaacagattgtcaaaaggcatatgagacatataatttttcaaaagtattgagtttaattcaataccatttaaacaatgaattgtctgcgttttattttgatatatcaaaagatactctatattctgacagtgtctattcattgaaaagaaaacagattcagaccacattatatcatatattaaacacttatagacatattttaacacctattttacctgtgttattgcaagaggtttggaatcatttagggagaggctggaagttgaatcaaaaagcgaaatataacttagactcgatcattgggttggaagttccaaatttcaaaaatattaattctctacgtgacgatatggaaaccttttctaatacaaagttaccaattttgaaattatttaaaaatgaacagcaaaatgtatcgaaaacacttaccaaaacaagtcagttggcagtggtcttgtatttgaatgatccactgaataagatctgtttagatgttgaagagttgacagacatcttacaagtaacctctgttgagattaagaaattggatataaaggatttagaagccagaagtggtaatttaattaaaatagagtcatgcaatattaaaatggaaattaaagagagtccattttttaaatgcccaagatgttggaaacatgctgcacaaaaagaaaatgaactttgccatagatgtggccaagttgtcaatcatagttaattatgtttattatacatggtacttatttatgtgataataaagcaagagtcaagtgtaattatataaattcttgtaaatataaaatgattataaaatgaaattaaagtattaaaactgttttcgtcagttttttttttgttttgtttcttttatttcagttttttatatttttgtgtctcctaaaatctttattaaacgacacacgtagtaacaacatgtttgctaagatttgtgggtatcaggaaagaatacatacatatgcatggtgaagtgagacattcgatagatataaaatattaatgtatttcaataagctggcttttaataatcacaagaattttgtcttatttcaaaggcccaaaattgttgtttccccatcagtaaacttcgttataggaacaaatttaaaaatagcatgctataatgcagctaataggttatatacaacatccatagaaccaaaggtatcttcacaagtaaaggagagggaaagattagaaaaattcatcaaaaaatcgaagatattgactaaactgaatggtaaccctaaatttaatgattattttgaaaaattaaaagaaactggaactattccaaccataacaacgtttttcatcttacacgaattgactgctgtaatccctttatttatgatatggtacatattataccattcagatttttggaatgaattcaacattactgaatctagtaatcccttattagttaaatgtaataaagctatcgagcgtctagtcggagataaatatgaaccgttggataaacataagttaattattacaggggctatttcttattctattgtaaaagttatgggtcccttaagaatgtttgtgagtctttgggcagctccatacttcggcaggtacttaatagtcccattccgtgaattaagactattcctgacgagaatttggtctaaatatcagtagtaacagtagtgaaaatatgtatcatctactgtaaacattttatgtaatcattgtatgactgaatattgactaaatataaacacacaaatagataaaaataccaattaacatagttttgatcttatatattctcttttcactgtattgattagagtcagataacttgattttatgcggttataaagtcctcacaaattccgccatagagtattatttctagtagaaaaaactccttatgtatattttaggcgggataagaaaccgcccaaaaatcgcttatcaatccaaaattttcggtgaatcaagtaaatttaatacacagttaaaaaaaatctatggatcaccttgttgtgtggtaagagatgactgtaattaacatagggagactgtcgctttgatcataagcaattctcgtttaataagggaggattatactacatagacgtttgtattaatattgtagaatatttgggagtaaatttataaattatttttttctttcagggttatatattagaggacacgtctaagttaagctaaactttatagatacggtctaatcttttgatctattttacccaagtattagaaatccacctagaaaaaaaacgttataatcagcttaatatatagagtataattgagtggaatatctcacggggcatgtataataataataaccaaagatcgtccaatacatatcaacgacactctcaagggttcaatggaattacctctcaacaatattcaagcagacaacaccattatccaatgtatcaaaatttacaacaaaatttaagtaatagagatacttggcaaaatcatacacagtcacaactgttaagtaaaaaacaaataggtaatactactgtccatggtagaaatccaatgttaatggctaataatgacgttttcacaattggaccgtacaaatcaagaaaagacagtgcaagggtttctgttttggagaaatttgaaattattggttatattgcagctgggacctatgggaaagtttataaagctaaaagtcgtgaagtggtaaatcctagtttaaaggacaccgttgataatataaataaaccaagaactgctgatattttagtaaattcaaggagagatgcagataataagattcaccatcaagcatcgaacattattaacaatggtattagtggtaatataatacaacagcaacaatacagaattgctcaaaattcagagctaaatactagcaataataataatgataaaaatgataaaaacagcggtaatgcaagccgaataaatataaaaacttctggaaaaagcatacctgcttctggtaatacttctacacatgctggagcaagtaatattaataatagcagtaataataataacaataatattatgcgatccacaaatagtcatgctaattcaaatttagaaaacacttcaaaaaaagataattctagtgttactggcaatggcacgcatgtagtgatattaaaacctgggacatctaatggaaaaaaggatcaatcaatcttttatgccattaagaagtttaaaagtgaaaaggagggtgttgaacaagtacattatattggaatatcacagagtgcttgtagagagatggctttatgtagagaacttgataataaacatttaactaaattagtggaaatttttttagaaaggaaaaatatttatttagtttacgaatatgcagaacatgacttattacaaattattcattatcactctcatccaaagaaaagattgatatcaacaaaaatgataaagtctattatgtggcaaatattggatggtgtgtcttttctacatcaaaactggattattcatagagatttgaaacctgctaacattatggttactgcaaatggttgtgttaagatcggtgatttgggtttagcaagaaaattttcaaaccttttacagacattatatacaggtgataaagtagttgtgactatttggtatagagcaccagaattgttacttggagctagacattatacacctgcaatagacgtatgggcgattggatgtatatttgctgaattaatggggttacaacctctattcaaaggagaagaagctaaaatggattctaagaaaggtgtaccatttcaatctaatcaaatgcaaaaaatattggaagttcttgggacaccaagctctaagatctggaaaaatttacacaagtacccagaatatgaaaatctggctaaatttccaaagtatagagaaaatttagctgcgtggtatcattcaactggtggaagagatagtcaagggttagatttacttcgtagattacttgcttatgatcccatagcgaggatcgatgcgattgtcgccttagatcatggttattttaccaacagtgatagtcctgttagtgaaaatatatttgaaggtttgaattatcactatcctgcaagaagaattcatacagaagataatgatatcatgaatgttggacgttctcacaaatctaggaacataggttcgcaatctcagatgatggctcatggtggtaataacacaacattaggtggtttgggtgtaaatagaaggatcttggctgcggctgcagctgcagccgcagctgtgtcaagtggatcattaccattaggatctagagtttctgaaccttcaagaaagaaaagacgttaatattatcaaaattatattatattgtcatttctttttctatttaaaaatacaatttcacatttttaccattttgcattttcttaacgtcataatagaatttttatcaaaaatattttgatatcccattattaatgatgcatttatttagatatgatatttctctgatgtaatacataatgtaactatttttatctgcatatgttttaatgaataatgatatatacttaaagaattgagctttgatttagcttcagcattatctaatctattttttagcatttttttctttcttttaaaccctataagtctccttacatcactactcatgccattatttttatctttactctgacttgtctcttcggttttttgctttttttgatgttgttgagctaactcttcttccttctttctcttagcattagctctagcctttgtagtattctctattcttcttttaacaacattagaattatcaatagcaaattctacacataaacgtctaccttttgtatcatcaaaatctatcaattttttttcctcatctgttaatccatcaagcacttccattctagtaactaaatgaacatttaaccatcttaaacccatcaatgcatgtttatgatctttatattccacaaagccataacctctacttcttcctacagtagagccttttacttccataataacttttgcttgcttaacaacaccctttttcttatctttctttttttgttgttcaatttgttctggggtcatgaatttatatttttcccttgtggatctggtaatttcttcttgacttaaaggatgtctttcaccatttttaacttgtgtagcgaattcaacaaccgctttacgagcaagtgcctttaaagctttatcagtcatagctcttggtaaatttcttatagccaatctggttaaagacaaatgtaaagatgggtttctttttagttgttctactctcaagttatatgatctctctctaatttccatatcctttggtgtcagtaactgagataatttagaaccttcaacaactttaccttcatttaataaatacaaattacgcttatcacgttcaccagaagctttacctaatatttgtttacgtttttctgcatttttttcagctctgatattagcttcctctctgtctaaggcaggagttacagaaagaacacggccttcataaacatattcgggtaaaacatcatcatcaattaataaggaggtagcacctgcagcaggtgcattttcaatacagtagttgtaagtcttttcatccctaaacgcaacaaaggcagtaccttttgctaacccggtttccttatcaataacaggtaaagcatacttaactggcccaaatttattaaaatgatctactaatgattctgctgtagcatcgtatggaacgttacgaacaaagatagaaaattgttctcttctatttctgtgctgcttagttggtttatcttcatcttcctctatatcatctaaatctgcctcgtcatcaataacttcttcatcggagtctaaagagatatcactatcgtcagatgattcttcctcctcttcactgtcagatatatcctcttcttcttcagaatcctcagatacttcatcacttttatgttttttcttgtaatcttcccatctatttttttgaacagcaaaatctactgcaacaggcctaccatcaatttttaaatctttagtgttttccaaagcatttttacaattgctaatttttttcatagtgacaaatgcgaacccacaaagtttcccatcgcgttttcttggaatagtagcttcaatgacagtaccaaaacgactaaaaatctttttcaatttgtttggatcacgacaactccaaggcatatttctaataattaacttcggtttaccttttaaaatgtcttcagtaccttcattattaacagcactagtatcttcttgttcattggacttactcttttgctttgaagtactgaactgttcttcagtatcttttgtttcatttttttagaacggtctcttctcttggcaacatcgactcttaatagatgatcttgtaatttagttttcctagctttagtcaaagcgtcttgtgcatcttcttcggtggcaaagcttacaaaaccaaaccctctagatcttttattagtatcttttacaacgactgcgtgtttagttggggcaaaattggaaaagaattcagtcaattgttcatcagtaacatccattggaatggatctgacaaacaacgttttcatatctaaaccattatcagattcactttcctgtgtagacttctcttgaagttcggacattttgtatgtatatatctattattattatttttggatggatctactttatatataataattaaagtgatcttggagtacaatgcactgttccactgttgcaattagtgaaggtgattaaaataataatttcgttccacctttttattaaaatatcttttaaataaggcaaggcctgtcatagaattatctattgtcaagagctataagtcagctcatcgtaatagttaaaggaaacttaattattaaaaaaaattttttcattctctcttctgctggctcaaaaatttttctttcggaggagaagcaaaaatttaaaataagaaaaaagaaaagaaaagaaaaaccagttttaactgttttttgaaggagggaaactacaataggcgaagaagtttcatgtgaaagaatatatatggtaaaactctgtgaaaaaatcaatcatcacaagaaaagaggtttattggattaatttgtttgttcctactatttgcaattttgaattaatcgctgtcttttttcagtagataaattagggatcatgtcaatatattttaaggcttcttctttatgacctttgtccattaatcttcgataaaatatttcatatccaataggtgactttttatcagtagcaaattgtaacaattcatcaaatctttctgtttccacaagtgctttacatttgatatgataatattttctttcggtaattctaaaagtcttcaataactccttaacatatttatcttgcttgatttctatcaatttgtatagagtctcatctaatgtaaattgagtgaaatctgaaccaagaatattcgttagtaactcttggaacttatttagttgtatttttcttgatagtgaaaatccatcatacgtctctaatgaatttttatgagtgaatttattgaataactcttttacttgtgggagaatagcattaatatcgccttgtttttccccttgttcaataatacaatacgataaatctaaatatttatcagtttgagtatagaaatccattaagaaattgaggttatgtctattataataacaatataattgattatctgaagcatctaatattaataatttggccaactgtgccggtgataatttgtctcttaatattaataataatgaaattattaattctggattatcagtatttagagcttcttttatagctatggagtcatcatctaatgaatataatgtcataattttacctactggattagattctaataatgataaattgcgacataatgtatatcttccttcagaaagtgccacctgggcaaccttagacataggtgcttgaacgccttttggaagttcctctaattgcctttgaatgatgtttaataattcatcatcttctagatcgcttgataattttatctttgtcgcacaccaattgaaaaataatattgggtatagtttgctttctccagtcattttgataatctctataattacagcatatcgattcatcaaaaatagaatcttaattatttgttgtaatccataaaattcatactctttttcagataagaaaatgttgacaaatttaaatgtgtttaataatttcattaatttacaagtcttgacaaattttgttgaatcatacgatttataaggtaatgaatttttgccaaatacaacagcatttaataaaattttttgaatattaggatcaaactcatctcttgttgcatcaatacaatcatctacagcttgtcttaaattaaaatgatttaatctttcaatagcctttgccggattttcagatactaatttccacgaatccaatagcattgcaccaggttctgtagatccaattttaaaaatccccacagttgatggcatcacttgggtgatcaaatttatgtttgttgtggtgataactttcaacccgtctatttcggaatctacagatattatataatctgggtaccaaaatgtgatatatgaaccatctttggagtatatttttacttcatcatcaaatattaaaccaactaaattgttcggtaaccatttcatatattttggtgatgattggcgatcatctaacgtaacttcagttaaatgatcttctaaaaaattctcatatattcgaaatttattatatttataattaaaaagacatattttaccatcactggatacactcaatagatgccatttatgcagctttttatgttgtaccatttttctttctgtacagtcaaattcaaagatatgattaatatctaataatattattttattattttgaaaagtatcccagtgactcctagtcaataatttataacttagaattagtggatcattgctactagggatagtaatattatttttcttattaacagtgctagtattagtagaggatatgtgggtcttacttttattcttgtacaacaattcaaaagttttttcatcccaattaattttccatatatcttgatttgattttaaaataactacatcgtttttataatcccatatagtgtcagcaacatcaattggtaaatttattacttggatatctaacttatcccaattttggattaatctaatcgagtcttccattacaattactaaatttaatcccaatctttctttgaattgaatatcaaccaattgagactttccaattaatcttattggaatagtctttattagggtacctttgtgatcataaatttcaatgttttcatcaataaatatagcaataaaacataaagatgtgcaaaatatcaatcgtttactactatcatcgccagtaaatttatgtttaattatatctggccaatctagagtagtcaattctctgtttctgtaatatatattctgcaatttttcccaattaaaacttggatttgaattcatatcgtttatatgtctctgaataaactgtctaatttcagtatataacttttggaaatgaataatagtaaaatgatattataaaactgtatatcaatagattgtagcggtaatcacttatgtatatatatgtgtgtggaggtatctacatatgtataattttgtactattcaggtaaaataggaacaatcttaacaaatataatagagttttaaggaaaaacataaagcaaaatctaaaaaacatgaaactataatgcgtaatttttgacacgatttgaatacacagaagtgattcactaattaaagaataaggaggggagagagtgtagaacttatgaagtgtgattatttgaattcacatggctgaatcattgtgaatatagttgatgttgaaataaaaacaaaataaagtaggaaccctcattctgagagtaaggttatctttgctgtagtattggttagtgataataatagcagtaatatttactagaaaggtacgtttagatcttttttttattgatatattaaggtgaagcttgaatagttcaattttgttaatatggataagggagataacggaataacgttgattgcatcagatggtacaaaatgtacgattactgaaaatgcagccatgatatcaccaatcctaaaggctattattcaaggacatttccaagagaaaaatgaaatagacttgccaaatattgatccagaggtgttaaataaagttattgaatatttagaattgaaatctaaatatctagatgaatcaaatggacaggaagattatgatataacaaattttgaatttgatgtgccttctgagatatcgttggaattattattagctgcagattatttaaatatatgaatctttatattaatgaaaattgtttataattatatatatgtatatgtaagtatatttattaatgtgtgtaggtatatgtataatgcagtataatgcagggactttgatattgcacaaaaatgattttatcttcgtggacctctatttaaacatctttgtaaatgagcagcaaatctattggcggatatctctcttttacagttttggcaaagaaaatattgtgacgactcttgttgttttggtaatccattaatatctagtattccatctgggtcataatagtaaggtttaaaatcgggatatctatcatgtaattgtctttgtctaacagtttctcttgatacaatatcttggattattgaatgtaacaaatttctaactatttgttctgatattgaatcaatggttacttgaaattcattttctggcatgtttcaacaataatatatcttattaataatattgatattgataacaatacttgatgatgtatggatatattgatatattaatatactgatatatatactctttacttctcttttttacttttataattttcttatatagtcatatataagaatactttttctttttttagactaatattaattgaattattacataaatgcaaaacaagctatatcgttccccggtttttattgtaaataaatgtattatgttctgtaagattatgagtttagaatacttatacattattcagtggaaagttctttttcattaaatttctgttatgttttttctttccattttgttccttttgtgttggttacgtaggtgaacatttttatgatgtatatacaagaaattaactaattcaaagttagagcaatacttattataacggataatgaatcatcatgaaaggaagacctttttggaatacaataataaggtgagcaaatagtaacagtactgttagtactatttaaaagacaaaattgttatgtgtgtaatatagatatacacacatgtagatatataaatatataaatcaacataaaaattgtgtttttatttagggatataatcgtagaattaagttaagagatgaggtagatgaaaataaagatgacaaacttcttttattttaagaccttaccatcaacgatttccttgttttcaccgttgacaacaactggcttgtcccaagcccacatgttgttaacaaattccttgtcatcttcgttggttggatctaatttagtgtaagagtaggattcccaatcaggagccacattgaaagctagaacattatcttgacctctaaccataaaggcaccaatgataccattgttgttgttttcaccgtagacaaccatggaaccaaacatatatttggtggaggcagtcaatctgttaaagaacccaccaattaagttatttgacataaaagttaaagtcaattcatcattatatttatattcaaccttccataaagaaaattcttctggattgtaatgttcccaaaaccatggtagggcaactggtctagtatcttcattggagtactttcttttccattcatccaagacaaaaataggtttacctaacaattctaatggatgctttggtttcttttcttgagctggtgggttatttggtttttttcttcttcttttttggcaggcttagcttcttccttcttctttggctgttctttcttttccttctttggaggattgtatttcaaaggttcatcaatgaattggaaatctttgaattcattttttaaaatatcagaagcgataacagtcttaaaccatctaacaatagcaggatgttcctttctccattgagtaccaaaaagataatcgaaacctctgacaaaagcggcagcagataggatatcagctaaagatatgttttcagtgaccaagtaagtgtgatcttttaatctttcttcgaagacattaacaaaaccatccaaatttttgtttacatcgtcaaccaatttcttaacatatggtttatcaccttttaacgaccggaagacaaaagcgatatttggtaatagatcactgttagccaaggattgccatctcatgatttgagcttgctcttccaaagtagcacccaataattggctttgcttcttggcatcatcagataagttgactagatagtaggcaatagccataacttcggttaatttgtaaccctttggagaaatgaaatctgggattttcttcaatgggaaatccttagcaaattgtgcttcattggtagctggatcgacgatattaacatctaaattcaaatagttcactaaagatcttggaacaatagatctagctctaaagttagcatataaggtacctaaggacatctcgcttgttgttatacagtgagtgtgacgcgactgttcacttagagtatcaagaggaacagaagtggtaaaaaacacaaaatataggataaaacaagcgcatgctagacttataaatgattaaggagtacgttgtgtaatagtatttaaaataaacaagtttgaagaaataaaaaaaaatgccttatttaattcaaatccaataatttcttctttttctcctcaagggtagaaacaaatataaaaaaaaatggaaaaaaggcacgaaccctaagaaaaatgtgtgtttggaaaaaaacttttcaaaaaatttcttcttgtcaaaatgattgtccagagcatacacctaaccctaaataatgcaagtaccaggagttagggcacagtctctttttaacctgattaggaaactgcggtgtttcaagatctttttctttcttcttttgttctttctcatattttgcattctcttttgagcaaacattttgattcaggcacacacaaaagaaaaagaaacgaaaatattgcagatcagccttttttttttacttttatcgttttttatcttgaaacttgttttattaaaagagaatatgcaattagacgtaagataatttgaaattgcatacgtggaatcaggcttcagggaaaagaacctcataatgtttgttttgtaagtgtcagagaaggagaaaaaaaattaaaaaaaaaggttctaagaaaaaaacttactaataataatcataaaaataaaaatacattatatatatgcatatatatatatatatatgtatatatacaaatatttttttcttaaaatcttatcatatgattaattatattagaagtaaatagaattggaaaatttttcacataataaggtcctattttgtttctgtaaggtatacaaaaagttagtcgaaatataaaaggaggcacaagagaatatgagatcaaacttaaggaataagacgcaagataataatagtaatagtagtagtaatagtgatggtggtaatagtaatagtagctgcaaactaaagaagctagaagtgacaccaatagaagaaacaaggcaagatacagatgtatcatcaactactacaatacactctccaaatgtgacagagaatattgtttcaaatgattccataaatacaaatattgatagtaatttgattgtaaaggcaagtgcagatggtaaaattgaagatataatttcccctgttgctattacagataagaaaccatttcaaaaggatttaccagaagacaagaataaaacaccttcttcttcaacttcttccgtgatttcttcctccttcaaagggtcagaatcagagcgattaaataaagatagattaagtggtagtagtggtagtagtggtagtagtagtagtagtagtagtagtagtagctcagtacaaaatctaataacaaacaaaatgaatcaaacttctttaaagagaaaacagattccaccaccattaggtatacaaccaggcaacaaaatacaaaataaaaatcaacatcaacaccaacaccaacaaaatttacagaatcgaattcaagataaatataggggcatagatgtaaatcagaatttgaagaaaccaagagttcgatatttaggtaaagtaccattaactaaaaaatattcaagattttccacaataccatatttacgaaataaaatgaagaatcataatgcatattcattgtatccctcacaaaagttacagaatgggactaaccctctacagacttcagcacagtcgccattgctgcaacaacaacaacaatgtttgtttcccactttttctactcatatggtatacccaacgagtgctattcaaccatcacaattgcctaatttcttctcatctctatctccttcccccgttccagcaccttttacagcacctttttcgacatctaatacaccatatatggcatctatatcgccttgtcatccttattcttattactatcaaaactactatcggaacatccacccaaattccaatgcaccaataaatccagatatgatagatccaacattgttcttaaattcagtcccgccatatctacaatatgatgacattatgaaacatcatcattataatgatggcgatgataatgagaaatatagtaataataatgaggatattggacaagcaacggaatcagaatattcattagggttgaaagctggtaatacttcttcagagtttgagacaaagatgggtaaaaatggcctcgatgataataaaataagatataatagcgttcaaaaggacgaaaaggatgatgatggcgatgatagtgatgacaataataatattgaagagtctgatttagctattgaagaaggggcagttccaacacctatttttactaagtttcaacatgacacagcatcagtggaaaacagaaatagtgttattaacaataacagtgtaatttttggagaaattaaaatactggataatcaatattcctttgaatatttacaaagaagtaatagagatgtaaacaagaaaatattcatgagtatctgtaaccagatatggaatgagtgtcacagataaataataaatactaataatactgaattttatgagcaaagaaaaacgaaataggaaaaccaaaaaaaaaatataaaaaaagaaggttgtgtttgatatttaattgtcagtttatcctatcaattaacaaaattattattatatcaacacaaatagacactgccgttgcaatatataaaatgatattcgtattcatgcacgatatataccatgttttatagtaccaaaaataaaatggacaatttttctttcttttcatttatgttcttttattcctttaatcactagaaacgggtttcaaaaaaatgttcgggaaataaaaataaaactaagggttatgttgtcatttcatacgaaaatttaaattgttttattctggaaaatttcaagaaaaaaacaaaatagcaatcggttgctaatatttttctatgaaaagaaagagacatcaaaaagtgaagtgcaaattctttgtccggttgtggtagagttattctataagtcgaaaacatctgctaataggaataacttgctgttactctaatccttttttattctacagccttatcctttctttcccctactccattcactgatattttccttcttttcctctacattggagctgtctatataagaagtaaggcaaaacaaagattagattgaaagtatccaatgatttcttggtctctggtgaaatatcgcttaaaaaagcatccaatatgggctttattgttaccatttgtgttttttacttcgtttttctttataatatccaaaagatatgataatattttaggcataaatgtagatagtatcataaatcaaaaatgggctaatgagattgaaaatacatggtatttttcatttaccagaaaatatagaatgccaagatatgtctataaagaacaaagagattggttatttagtgatcatgtagaagatattattccagagagtcatattgctcattttgatttgaataaacttcattctacagcaaatgcagcaattaataaggagcatgtattaattttgacaccgatgcaaactttccatgaaaaatactgggagaatcttttacaattatcatatccacgtgaactaattgaattagggtttattataccaaggtcccctagtggtgatgtagctttgaaaaaattggaagctgcagtcaaaaagattcaagcaagcaagaaaaatgacagattttcaaaaatcactatattgagacaagaatctttaagttttgaaaaattggaggaaaaagaaagacatgcattagctgttcaaaaacaaagacgatctgttatggcaaccgctaggaatgaattgttattctctaccttgagtccgtacacttcatgggttttatggttagatgcagatattgtggaaacacctgtcaatttaattcaagatatgacagcgcataatagacctgttcttgcagctaatgtttatcaaaggtattacaatgtagaagagaagaagaatgatattagaccatacgactttaataattggcaagaaagtgcaacaggtcttgaaatagcttcaaaaatgagtgatgatgaaattattgtggaggggtatgcagaaattgccacttacagacctttgatggcacatttctatgatccgcataaccctgtcaatgaggaaatgcttcttgatggagttggtggtggttgtactttagtgaaagcagaggtccatagagatggtgctatgttcccaaatttcccattttacaatttaattgagactgaaggttttgctaagatggctaagagattaaattatgaagtatatggcttaccaaactatttagtttatcatattgaagaatagatagatgcacaaaattttatatacattctatacattatatgttttgtcagattatgttatgtcagattatattatattatattatactggatagatgtgtgtgtatatatgtctctttccttctctctctatctttctttctcttcatatgtgttgcgtatgtttgtttgaaataaaagaaaaaagaaaagataagaaaaagaactaagctaatattataataatacaaaagagaagataatgggtttgacatcagaattaaatgaagatggcacaaggtttgtctgtctgtccgtctgtctatctaatttagtttggtgattgctcttgggttattagtttatttgtaaactggtggtcttaattttttatttctttgtaatctgagtatcaaccaagtcattgaatccaagataccatcaccagttaaggcactaacgggcaatacacgggaatctcgtgcacttaaatgctcagcaatctggttgaatatttcttttatatcttgaatctccattctatcttgtttatcttgtttatttgcaagcatgaggacaggtaccccttcaatttcgtcattcatcattatggaagtcaaagtgtgtttccactcatctatcctggatctatctgtactgtccaccacaaagataatagcatggcattgagaatagtattccgaccacatggatctcaaggattcttgaccgccaacatcccaaaatttcagttggatcttctgttcggtaagtattgtggcgacattttgtcctaccgtggggacaatcttatctagttcctttgaagatagtttgtatagtctttttaaggtttcaaggaatgttgtcttgcctgcgttatctaagcctaggataagtattgagtactgttcttttttgttccaattgttatataaaccttggaatagatgaaacattatatctatatgtatgtatgtatgtatatgtatatatgtatgtgtgaatgtaactatttctttcttatatgtatgaatagatataattgtatatatatatatatatatgtcaataatcttattttatttctatttctattatattccatataattgaatttttttttttcctttgagtttttcccttccttttgagataataaaaagaaacctttaatagtatatatatagatattgatatatagatatagatgtagatagagatgatctggggatgggctggttataaaaaatgtcatatatcgaattgtaaaacgatgaaattttcatcagttaacaagagatcgtccaaagttaaatcattaaaacggtctctgtcttcattaggtagaatcttgccactgatccaatttaagtttttcaacaggacctttgtatcgttccaactcaagtctctatgaaggtacagtctaagttctgtgcaattgcaagcatctactagttccagcagagagatcaaccagttctttagattgttgtttgcgatgatatgatggaattgggtattgaagtttgcagggacgatgatgttcaagatatcgttgatttgtttggacagtaggaaggggtaagaatttggtataggaatattgaaatatagtaaaaggtaagtgtctgcgatggatctccataggggttgtatatgtttcttaatggggtgaatgtcgttgttgttgttgttgttgagtttttcggagatgttgtttataagatagaactttctgaattgtttgaattgattatatgtgatctctttacaaaggaactgagattctattagtagaatgatgtcccaatagaactccatcagttgagaatggtctatatcagttatagttgtgttgttgttcttgatatttttgaaggagggtgtagtattagagatgtcacgcataccaatttggaaagccatcggaagtagtagaataattcaaaatgtttggaagcaaatcatagaccatagatttctgtttaattaaagatgtgataggaaaagataaagcaattacgtcagggagatatatgttattgatattggtattagtattggtattgtgacaactgatcctatctgtgttgtggtttgtatgtatgagattattagttaatatgtagttgagtatgttgttttgttttttgattaatgtttctttcataagtggaaaagatatttaattagtgaatataagtttattttgaatatttgtttgttaggttatttgtttcttaaataacagtgatgaagataatagaacaagaacacacatgcatgtatacatatacgtaggtttatatatatagatatatacataatatatcgatgaatgaatgaatcaactaatcctcacacattcaaatcatccttgcatcgaacaaaaaaatgaaaaaaaaaagaaagaaaaagggaaactgtgggcggggtgtgtgggtgcagctgcagccgttcactgtgattcttaacagcaacgcaacgcaaaacagacagactccataaattttgttaaagcagtagattctgtcacacagtttgctcatctatctaccaagacacaacaagcaggagaaaggaggacagagactttactgagaatagacacggattctggcaactttcttactggtttggctggactccactatgtttggagatggtgtgttgttgcggggagaaggggggaaaatataccaggtgaagtggagagcaaatgcaaagacatccacacaccacatacaaaaagtaacagaattgtggatcttggctgttttttttttcttttctttactgttttttccgttttactgtcttttctttttttatttcttttttgtttgacagatatattttgattgcaaattttttatagtatcttttcctttcatgttgtcaattaaacacatctttttcccgtaatataatataaatatatatatatatatttatggtatgcgtttgtgattatgtgtgcgcatacgaatgcatacatgtatatatgtatatgtgcaaacatctatatatctgtccgtgtatatatatatatgcatatttatacttattgtatcttcaatgtttgttcattccctctttccgtctataaatggtgaggaaaaaaggaaaagaaacagagagatttcctcttatactgatctatctatctttcattctattattgtttgcagtaaataaaatctgagaatattaaataaaacataatgccaagaacaaattcctccgggaataaaaaatataaaaatctaactaatgaagcttacgcacataagcatgaacataaatatgaatatggatattcacaacggcataataataataataataataataataaaagaatattattcgacttaaggctgttattaaggtatatccatgtaattctggatcttttgaaaagaaataaactcaaagctattttcatatctttgatcgctatcgctttggctttgactttaacctcaaattcatctttcaataatccttcctccatatctaatgcagatccaagattaaaaaattacaataataataataactatggtatgaacgattacaattatgattataactatgcttatgataataaaaatgattatgattatgattataatactaatgactatagtgatgatgattacgattattattatcatatggatgtttctgagttggatctttccgattatgagataaacgaattgtatcaacaaggtcttctgatatcctctcaaaatacagatgttcatgacgatatggatggctattattacaattcttacaacaataatgacatcaacagtgacgacgaggacatcttctttgaagacaatatcgttaaggttaacagaaatataacaattgatgaacttaaaagaaggaaagagaacgagatcaacagaaaagtcgcccagagggttaagaagtggaaggattcatggctgaaaggtcacacgtccaaggagaagataccatctattcaattcgaagatactttggagggctctgttgctcaatctctggccagacacgggtttaaaccaaaggggtccttggttatgtacgtctcagactcggaaattaacgatattgtcaagactattgactctgtgcaggcccattttaacaattgggtccaatatccatggatcttggtcagtgttgatggtaaagaatttaataataccgaatgggtagacagattgaaaaaatataatatatttagaagcaataatactaatactactagtagtattgtcagtaatgaaagtaacagtggcaagaaaacaaagattttcttagagacggtctcagatcagttctgggccatcccaaaatggatcgatgtaggtaaattagcgcaggcaaggaacattctacggttggaaccccatattgaatcaatagaatacaagatctggacaagatatttcactgggtttttacctttggagagcttcatgtcaaactatgattggatgtggtacattaaacctggcactgaattgttctgtgatgtcgactatgatgtatttagatatatgcaggattccaaaaaattgatcggtttgtctgggtcacgtaaagtagataatctaccagatttccaatacgaaaaatattataaattcttaaacgaaaaacacaaggatattattagaaagactaatttggaattatttttattaaggaaagactcaaaagaaaatgataaaaaacttgataaatgtgaactactagtagagggcttttctatttcaaatctaaatttctggaggtctaaagtgtatcaaaaatatttcgaaatcattgataaagaaggtacaatcttccacaatgcttggacaattaataaagttcaaactttagcgatcactctattgataaatgaagaatctttccagtttctagataatttaggttttcaaaatgatgattattccaattgtccaattgatgacactgtatatgatatataccgttgtgagtgtgatcaaggtagtgatatgacttttgtcgatagcacttgttcaagaaaattttatgatattctaggtataccatttcctcataattgggagagacattccaaaaatttaagagaactaaaattaaagcaatgaaagataagaaaagaagaagaaatagatgcatatatatatatatatatatattactattatgtaatagtaaaaatgcagactggatgaaaataatataatttcgatagtcttttgtcttttctttcgtcttttttttatttatttatttcctacaaatcatcaaatttaaaatgttgatattggatatatgttggagactggaagggtggttgttggtagatgaattcattttcttcttccagttcttcttcttctttttccaaatcatttaaaattgaagaatagtgtaaataacaatcatttgaatctatgtcttctaaaccagccctgttttcttcttcttcttcaatcttggtaaacatgattggtgtaaaatttttgttgatattattggtagctgtgttagtgttagtgtaaatgttagtattattttcactgtagttataattataattatttgttgtagaatggaaactatcaaaatattttagtatgatgttgttaggtgaatcaagcgaagaacaagacaaagaagaggaacaggaggaggaagagggaggtggtgtaaaaggaatggatgatctggatatcaattgattatatgcaggatattcataggtataatttgtcgttagtgtttcattatttttaggcaaggaagaaagaaactggtttatgttattattcgtagtagtaaaagtagtagtggtagtattagcagagctgttattttcgaattttcttgaagagaaagatgttttattagcagcaaaagtggatgttgatgctgatgatgaaatatatttatttgataaaatatgtgaattagcacacttattaccgaacttacagtttccgaacttaaagtatttacatggttttttattagcttcattaaagtctaatgaatgagaaaatggacacgaactacctgcagtacatttgccttgtttaaaaaatttacatggaacatgagaatagtttttcgtttgctgggttgattttttagtgattagtaaatgttctaaaataacttgtttcttttctggtgtgaaattcgttttattattgttgatattactgttgttgttatttttctgataataatattggtaattgtttattttttgatgatcataattcattttttgtttttttgttttttgtttttttttttaatatttgtttgaaaattcaacaattacaaaagaacacaaaggaagatgtgaacaaaaaaaagctcttcctttcactaaaaaaaaaaaaccaaataagaataacttataataaaagaatcaaataagattattattgaaggtgaacaaaacaaacatatatacgcatatatacgactctatgataagagatgataagatgaaattgattccaatataatatttcattaaaaatgcaataacataaaaaataaaaaaggatttacccaaaaataattaataaaataatcgtttgtcaaaaaaaaaactgttccctttatatagctagcaaagagttacattgaaacatgaattttaaagatatctatattataaactattggtgttaaaatgccaaaatagcctgttctaaatcgaccttctctctctctctctttattttttttgtgtttttttggtaaatcaaactgaattatgatactttcaatatgaagattccctatttccctccccttatactaataaatataatttgaaaaagaaggacgaaagaaaaagaaacttgtttgttcactaaatctttcgtctcgtctaccaccctcctcatcccacttctttcaacacacttaaaactgcaattgccggtgaatatcatcgaagcataccacctgtactatttaattatcctatttaattataactgtaatgaactagaaaaaaaaaaccaaaaaattcactcacaaaatttctttcctcccctaatactccccaaaaggaagaaagaaagacaaaacaaaacaaaacaaaacaaaaataggggatatattcaaactctataatctgatgaacaataacaatagcaggaaattaaagaaaaaaaaaacaaacaaaagaaaaatcacattcctgtaccgctaccatattgtctccgtttctgccgcacaaaataaacgtaaatccttccaaaaaataactgtttattctgtaaagctctatcacttctcacggtgcctgctgatttagttttataaagaagcaaacaagaaaaaagaaaaaaacaaaaataaaaacaaaacaaagaggaaataaagtataacaactagataaactgaacgttatgaagcatacacacacacacacacgcacacaaagtttacctgcatctgtggatagcctcttcccttgcttttcagaattcagaattaaacctgttccatcaaagttaggttaagaataatacattagtagatatataagtatatacaggagtgccaatgagtgaatacaacaaaaacagatataataataacaatcctaataattatcattatcaacataattataccaatgaaaacagaaatttagatacggatccttctagaaccccacgatcccgttacaaatcctcctcctcctcttcttctccttcctcttcctctttctcctcatatctacaacaagagcatacacaacgtccaagatatagttatcgtcatagttattatagctcttcctctcgtaatataggaaaatatcattatagtaacagaagtcacccgtattctaagtatcacactgctcataatggtagcaatgatcatataaaacacagacataatagtcagacatcatatctgcatcaacaacaatctcctaattcaacacataaaatttcaccgtcctcttcaactttatcacattttgactatcattataataacactactcctaccagcaatacaagatttgaacatggcagttatccccaaaggactccatcacctagaatcgccgcagtatcgtcaaagtctaccataactgctgtaactggcgatatttctactaccactaccactactactactcacttagttgatcctattaataaaacgtcttcttttattatcaacaatgaaagacaaccagataatagcaacaataataacaatgatcaaggtaataaagataataatattattaacaaaaacatagagaataacattagtaagaatacaattaattataataatacactaaattcaatatttcatattattgggctggatacaactacctccatagataaattaatatcagtagatgaagaggatgaagaaataaatattaaattagaaaataatttcatctcttctattgaatcaaatctagaatatcaattattaatgaatcagtcggagaaagacactttgaacgttcagttaacacaagaaaaattagataatctattattaatgcagtaactgttatatacacatatatgaatgtttgcacgtttatatttgtgccatcccacactgtaagaacctaagaggatgaaaagaatcgatccatattattgttatatacacgtagttcgctaagtcttatatacatacgcatatacctctttttagtattctacataagtgaaggaaggcatgaaaaaaaaaaaaagaaaaaaaagaaaaatcgatgttaaacatagatatttagcaatctgttagaggttactatgatgttcctgatgaattaaatcgaataaagaattaatctaagaaaaatgaaagactggtctaaagattcgataacagttagacactaataaacgagactgagttaaaaataacatagaagagaatatacaatttcaaatagatgtccaagcatataaattatcgataatattatttaaaatagaaaacccctctctatcccccgcattgttctctttctctgcccctccccacatagaagttaaaaaataaagaacccaaaaggaaaaaaaaaaacaataataaaattacagtaaaacgtaataaaatgaacaagcaagtctctctccttcctattaattcctcgatcaggaaaaagccattttttcttttctttttcttttttttttttttcgtgtcgcttatataacaataaagcaaggaaaattcgtgtttatggtttttttttcttttttttaatctaattcttctcttgttagaacaaaagcaaatttaatgtagtttagatatctagggtttacaagtcctcaccatttagaagagtatttttccatcaatggatcttgatgagaataattagggttctaacattaatgacatacatccttaaagtatttggaaaatttacttgtataatcagctattctcttcctataatagattgacaatctactcacctattcatatacaacctacatcctccatggaccatcaagaaataataattgtagaaaagttcttgtattcctttactctcttaaattaaacagcctatacttctactaaaaataataaaaggaattcaaacatataccattctgaaaccaagatagcccttaagtagatatattacatgaaatgacacaccacagctttgccgtagaaaaaaccaaaaataagggaattctttcccatcggccagatctataatgcatggctgcttacagaatcttgcaaaagaaagatttttgtattaggtagaccttacattctccatgccactcgaaatcctttaccattaaataaaatttatatcttctgagatcatctaataaacctcaacaaaattatcgatcaaaaagaaaaataaccctgaaatccgtaccaagatcatttcgcgtcataccaagcaaaatgaaaaatgaaaataaaaacaaaaaaaaaaacaaaaacaaaaaaaaacaaacaaacaaacaaagaagggatggaatttgcttcgcctccccccgggtttaatgtttatatccttcggattttcttcttattgtcgtcattatctattatcctttaggacaaagaagcacagccatgttttttttttttttttttttattttgttttttgtcctttatctttatttacgttatatcacttttgtaactcaccatgtgcttgccctttcttcactgtttttctctcttgtgcatttcattattccagattatcgttaaaagattgtctgtaatccgctatatataatcctttgatcattttgtcggtctttatatatactcgcaaccttatacagttccgctcttcctcatttccctgtcttcttcgacttgtctatcccatcttgctgcctctcccatcttgctgcctctccataataatttctttctccttcttctcttctttcttctctccagtcagaatcctaagaggggtgcataaccaatcagaattattatcatctaacgtatcctatttcaatactaattcgctaaatatagctaccagcattatcattttcatttttttttttttaaagttctatccactaatctaaacttttctatcacatactaatccatttttctcaatattcattaaatagatataatatatataaaacaactagcagcatcaacatctcatagcaatagtctttcaaaaaaaatacttcactagcatagtccctttttgtaatattatccattctttaccaaaataaatttgattttatcagtttttataatcctttacaagcatatatgacaagatattctacatcatgagaagagaattaaaaatattattatgtgctaacctttttctaattatattcatattatattatacattcgatcttcatatgttgatcattgacaacaccatagaggatagcataccaagtaaagatattgccccgaacagcacatggtcaacagacaatttaaatgaaaatatactgataccaaaaatcatacaccaaacttacaaggatgaaaacatcccatcgcattggaaagcaggccaagctaagtgccaaaacctaaatcctgattataaatatattctttggacggacgaaatgattgaggagtttatcggaagagaatttccttggtttctaccagttttgaagtcttataaatacccaatccaaaaagcagatgctattaggtatttcgttctttggaaatatggtgggatatatgtcgatttggatgatacgtgtcagcgtaattttgatccattattgaaatatcctgtctttttaaggaagacagcaccatttggtgtatcaaatgatgtaatgggagccattccaaatcatccatttttctataaggctatacactcgttaaaacattacaataaaaactggtttgctccatacttcacaatcatggcatccactggtcctgtttttattagtatagtatggaaacagtataaaagatgggaaaagattaagcaatattgggattcaagttaccattatatagattcagaaagaagtgtacggatcttacaaccatgggattataaggactatccaaactctttcttttctatttcaaagggaagttcctggcatcttgatgatgccgactttattaagtctttcctaacccatattttatcctgtgtcgtggctggattcattattggtttcgtgatattatatggtgaatattccatttattgttttatgtgctccaaaaaaaactatagtttaacatctatatggaattccattaaagagttcatctcaaatagtagagcttatgtgaacttaaatgatgacagtgatgaatacaacagttcatatcatccatcccatagttataaaaacaaccgtcaagctccatctagattaagaaaagattctaataatctaatgtatatgattgatttagaaaaaaacatcaagatgaatcctaatagtaattaatataggtgtttttaatatataaatatatagtgaacggcaaataacttattcaaagacaatccatataataccattgaatatacttaattcatttagagtcaataaaccatatatatgattagcatacaagattcatattccttctttatcactattctttctccctcttttttcctttttctttttttttgtttttttttttgtaaacagctaacaaaactcatttcaaacagggcaagttatctattttttaaataaataattcatacctacctatgtatccataatcctaatgtaattactttaccataatcagcaataagtgcttttttttgataagagccgtagaaatatctaaataattcgttaatttacattcgtcaccgaaagagtcgcaaatcactatcttatttcttcggcccttacatgaaaagtgcaacgtcacctaaaaataagaaaaataaaaaaaaaatatgagccgacttaaattacacggtttatgagattaagtaaaattttttcactgaatcttctaaagagaaaaaagaaaaaaaaagaaaagctttttctttttaataactatttataaaaaaaacaactaaaaacctaattaagattatttctgaggaagttatatgtagaggaacatgtatttttgacacccgtatttgccttttgtcattaattgtaagaaattctatagaacaagaaccacgtcgagtagtttttttttgtttcataatgactaaatacagatatatagtaaaataaaattgcatgtagaaaccttgatatttaatcgccgtctgacagttagataattccaaatttaactgtattccttcatctttagacagagaatcacaatgatattactttgcctattctcaatatcctgatactaagaacattattaaatatcttctcaactccctatttaataataaaggccaaacataacaaaatttaatgcgatgtgtacttatttaatacagttttttataactccttgtaattttaaacctcagattccgtaggaataataaagtataataaaagagaatataatttgtgtaaccctttaagactttctgtcaagtattacaaactttcacaaattacatatggtaacacattttccaagactaatttttcagactcaagttgtaaatatctttttattcttttttttttattttcattttttaacacatttagaagtattatttttaccaactcttacaattgttagagatataataatatctcaactttatattcttacacattgtggaagagagagagaggaggagtcaatctagaatttatctatgttaagatcttgttcctcatgtattaaataatcatccatctatttttgttctcgtaacaatttgagatcctacatttatagatattttataattataaattgatttaattgatataacagttctttctttctttttttcttctactttacttataagttatatagacaatataataccccttgtgactcactcaagtatcaaaatcgcaaactgtatccctcacacaattactgcataagaccgacaaattattagatatgactgaatttgataagagatgagttaaaactagtaagtccagaataaattatcacattttagagtcaatatgtctcatatcaaagacgtcttctaaatatagcatattaaaaaatctacctgtcaacctcggctgatatacaagaaacacttccatccaaaaaaaatctctctttttccgtttattactgttttctttctttcttttttttttttattcagacggttgattctttttctatagagatttttgacggctcatcgaaagaaaattgtagttattctttcttttttctgcaatacctttttacttttttggttaagtaattaaaggatcggctcttatacttgcttatcaatttgtaagtatagtcaattaaactgtaatatatttctcaaatattattatttgacttaagaacctaccattcctaattgacccacaatgtgacaacaaccgtctctttttttttcatatgctatagttttaaagatagctaagccgtcaaatataatggtacttctcattcaaaacattttaatatataaagaacccatatctccatgaaataacacatctttccttctatacgactctttctcattgtatctcacgttatttaagttaacaccccaaacaaccatacgcatatcaacataggaccatgtcttctaaagaagaaagggacatatcgtccaaatcagaagatggtgataccaattcgtatgctgagtctattcattcatatgatgaaatgcatatggatgatgaacaactaaacgtcacttcacaactatccagacacatttcacacatgctatcaaatgaagtcggtgtagaaaaattagaatctctagccaaagtcatttctacaaagacaaaaaaagaaatggatgcgttcgaagttaatgaattagattttgatttaagatccctattgaactacttgagatcccgtcaattggaacaaggtattgaacctggtgattcaggtattggtttcaaaggtgtcactactgtaggtatcgatgcttctgctgcttttggtccatctgtggaagaaatgttaagggatatggtcacctggccaaaacatataatcaataaatttaaaaaacaaaatgatacacctttaagaaacatcattcaaaactgtaccggtgttgtagagtccggtgaaatgttatttgttgttggtagaccaggtgcagggtgttccacacttctaaagactctttctggtgaaactgacagttttgtatctgttggtggtgaattctcctatgatggtttagaacaaaaggaaatgatggaaaagtataagggttatgttatctactgtcctgaattagatttccatttccccaagatcactgtgaaagaaactattgattttgctcttaaatgtaaaaccccacgtactagaatcgataatatgacaagaaaagaatatgtcgataatatgagagatatgtggtgtaccgtgtttgggttgagacatacttatgctactaaagttggtaatgattttgttagaggggtttctggtggtgaaagaaaaagagtttctttagtggaagctcaagctatgggtgcctcaatatattcatgggataatgctaccagaggtttagatgcatccactgcattagaatttgcccaagctattagaacagctaccaatatgatgaataattctgcaattgttgcaatttatcaagctggtgaaaacatctatcaattatttgataaggcaactgttctatacaatggtagacaaatatattttggccctgctgataaagctgtggattacttcgaaagaatgggatggatcaagccaaatagaatgacatctgcagaatttttaacatctgttactgtagattttgagaacagaaccttagacatcaaaccaggctttgaagataaagttccaaaatctagtcatgaatttgaagaatactggttaaactctcctgaatatcaagaattacttactgcatatgacgattatacccaaagacatccaattgaagaaacaagagatagattacaaatcgccaagaaacaaagattacaagctggtcaaagagagagctctcaatatgttgtcaactattggactcaagtctactattgtatgattcgtgggttccaaagagttaaaggtgattccacttataccaaagtttatttatcttctttcttaattaaagggttaatcatcggttctatgttccatagaattgataacaagagtcagtcaacaactggtggtgcctattctcgtggtggtcttctattctacgtcttattattcgcttccgttacttctttggctgaaattggtaattcctttgctacaagaccaattattgtgaaacacaagtcatattctatgtatcacttatctgctgaatcgttacaagaaatcattactgaactaccaactaaatttgttgctatcttaattctatctttggttacatattggattcctcttttgaaatatgaagcaggtgcatttttccaatacttgttatatctactaactattcaacaatgtacctcttttatttttaaattcgtcgctactttaacgacggatgcagtaactgcacatgccattggtggtttatgggtgatgattctttgtatttactgtgggttcgtgttacctattggtgaaatgcatcattggattaaatggattcatttcttagaccccttaacatatgcttttgaaagtttaatgtctactgaattccatggaagagaaatgctatgtagtgaattagttccaagtggtccaggttataaaaatgtctccatcgcaaatcaaatatgtaatgctgctggtgctgtgaaaggtaatagatatgttagtggtgatgcttacattgaccatcaatatcactttggctacagacatgcttggagaaactggggtgtgaatgtcgtgtggacttttggttatatttgtgcaaatgttttcttatcagagttcttgaaaccaatctcttctggtggggacttattactttacaagagaggtcatatgccggaatttgggactgaatctgctgaaggtaaaactgcttctagatcagaaatgatggaagcattaaatggtccaggtgttgatctagaaaaagtcattgcatctaaggatgtttttacatggaatcatctaaactacactattccttacgatggtgcaactagacaattactatctgatgtctttggttatgttaaacctggtaaaatgactgctttaatgggtgaatctggtgctgggaagacaaccttgttgaatgttttggctcaaagaattaatatgggtgttatcactggtgatatgttggtcaatggtaaaccattacctgcttctttcaacagatcttgtgggtacgttgcccaagctgataatcatatggcggaactttctgttagagaatctttaagatttgccgctgaattaagacaaccaaaatctgtacctcttgaagagaaatatgaatatgtggaaaaggttattaaattgttaggtatgcagaattatgcagaagcatatattggtcaaactggtagaggtttaaatgttgaacaaagaaaaaaattatctattggtgttgaattagttgcaaaaccatcattactgctatttttagatgaacctacctctggtctagattcacaatctgcttggtctattgttcaatttatgagagctttagccgactctggtcaatcaattttgtgtactatccatcaaccttctgcaactttatttgaacaatttgatagattattattgttgaaaaagggtggtaaaatggtctattttggtgatattggtgaaaattcctcgaccttattaagctacttcgaacgccagtctggtgttaaatgtggtatttcagaaaatcctgctgaatatatcttaaactgtattggggctggtgctactgcctccgtcaatactgactggcacgaattatggttagcttcacccgaatgtgctgcagcaagagcagaaatcgaacaattacatagtgatcttccaagtaaaccaacttctgataatcctgaattgggtagtagatttgctgcttcctatttaactcaaatgaaatgtgtgattcgtagaactttaattcaattctggaggtctcctatttatattagagctaagttcttagaatgtgtcacatgtgcattatttattggtttatcctatattcgtattaatcattctgttggtggtgcttctctagccttctcttctaccttcatgttattagttattgctttggccatgattaaccaacttcacgtctttgcttacgattcgagggaactatatgaagtaagagaagctgcctcaaataccttccattggagtgttttattgttatctcacactcttgtcgaattaatgtggacttggatttgtcagttcttcgtttggctatgttactactggccatctggttataattcatctgctccacaagctggttacttctatttcttctatgctctcattttcccaatttactttgttacctatggtctgtggattctttacatgtcaccagacgttccatcagcatcgatgatcaactctaacttattcgctgctatgatgttattctgtgggattcttcaaccggaaagaaaagctccaagattttggagttttatgtttgatgtctctccattcacctatgttattcaatcgttagttgctcctgccattcacaacaagaaaataacttgtggtcctaatgaatttttgagaatggatccaccagagggtcaaacatgtggtacctatttatcaagatatattaaagatcatagtggttatttattagaaccaaatgctacttcagattgtctatactgtccatacaagactgcggatgaagttgttgccaaattcaacgttaagtggaagtacagatggagaaattttggttttatgtgggtttacatttgctttaatgttatcgctatgttactttgctactatgttatgagagttaaagtatggagtttgaagtcagtcttggactttaagagatggttcaatggtccaagaaaagaaagacatgaaaaggaaagcaatatcttcaaagccacaaaagaagataaggaaagagttacgaaacattagatttttctaattatcaattcttcaaatagataaattatatattattgtttatagactgtttatacctactgattaattacgttcttatgaaattacatcactttttatattcgattcttattaagactaatagattaaagcatctaattcctatttataaattaagttgctttcatatattgaattttttgtaatctaaaaaaagtattatcttaaatatttacaaaaaaggtaaacaaaatcaattgaacatacatcccatattcaaacttcgagagtgcaagtttttggaagagataaaaagtttcatcatttcaaattaataaaaataaaatacatgacggtatcatgagtatagttacataacagagaaataggtaaattaaaataaattaactcttccagtataaactcataagcaacaacaaatatctttttcaccttttaacgtcttaatttaaaaaaacataattcaaaatttagatttcaaatatttcatacaatgaattattttgtcctaataattttatgttataaacacacatgaactcccaatttttaatatttttctatattaatcatttagatggagtaagcatatgtaactcactcacaaatgttaatttgtactaagaattccaaacattttttctaaccagataaattcttgatattaaccaaatatttcatctggactaaaatttagcaaactttctgtatataatattacctttgagaacttcaaatatgtatatacataagataaatttcaaatatgctataattcattgtactttttgccttggctatacattaagacaatattgtgttactataaataagcatcaaagtaaataataccttttagtagttccatttatttttcaaaataaaactccaaaatatttgataagacagcttcttgaaaaaagccattaattaaagaaacaatttcgaatttattacaaccactgtaaaacagaagaaatattacgaaaaatacaaaaaccaaagaattaaaattactctatacttagttatatttataatatttgaagatagtcataaaggataaagaatatacacaaatctccaaaaaaaaaatagctagtacatgccggagtgaatgggacacctatttgtcataatattttattgatttttaatatactacttattattttccaacttaataatatattattatttatttcttctatcagtttgtttacttatttatttgcttattttaactcagatttcgattaatttttaatataaaaacgacagaattacacactaaaaactgtcatatcaaaatgctctcttaaagttttttttaaagtccaagtttaactgtatttgctttaaaataaacaaccccaactatttgaacaaaacaagccttaaaaaattgaacactaaaaaaggaaaagaatgaaaatcaacaattttcatagagaaaaaaacattaatcataaaatctgaattgaaaagacgtcttacgaacaaacgtaatggatgaacctcagggtcttctacttatgactacatgttctgactaaatgttctgactaaatgttcgttagataaacagttaatgttaattacatggggaagaccttttttgcttttttgttcaacaagaaagagtaacttcttcttctttctttccttttacacaatatagtgtaaagattaaactaaatgaagacgaagattaggaaaaaaatatcccctatataaaacgataattatattaaattaaataattatcagttcttacctctttgtgtattaattatcttactattttttttattttatttattggaatgatagataaatagataaatagattgtttaatatacttggagcgaagtttataaataagaagcatcaattatttacaagactaaaggcataggaacacattaaatcataatttgaaacatgctgtacttatttaacagaaataatttctttgtatttatgtacatgtgtataaaaatagacagtttacttctccaaaagaatgaatgattatatacttaattcttcttgctgatatcttgattttgttcttgttcgacctgcggattttctgcctcctcagatattaaagcatcagcttcttcaagaagatcagctaactctccactactagccatgctagtaaggacatcacagccaccaacaaattccttgtttacatatagttgagggatagttggccagttagaaaattccttgattgcctcccttaattctggatcttcaaggacattgtatgcagcaaacttaactgggtctactccttgcttaccaagaagagccactgtagcccttgaaaatccacattgtggaaattctggagtacctttcataaataatacaacaggagcagaagcaatggcatcctcaattgccttacgaatctctgtactcatgaacaattttaactgtggacgatataatatagaacgtgatatcgaagtaataactcgtggtgaagcaattttatcaaataacatccttattttaataaattaagtagttctattatgtgattctttgaatataaatgtgacaaaaatagtcctacccttttttgttatatcttcgatcgatgaaaataaaaatatacctataattagaaccaatctaaactgatcctctatatctatttgtttatcagtatgtacattatcctttttacagttatattgctgtattttttatttctaactattacaaattgatttgactccatttctttctcttttctttttttctctgttgactaatcaaagtaaaaaaatttacactgtatttgcaaaagtgagatgagtaataaaactgtgtcatattgaacgcatcttctttttctttaacctttacatgtaatatatatgttcaagagctaaggtacgtggtatctttgcaattgtaactaataattaacaccacccgtagttaacatgctaacactaacatttgtattaattaaaattccatatattactatcatgcaattagtaaatgctattttttgtcattttaatgacaaagttttctacaattcacataatacaaagaatacagaagtatatatatagttatcacttttctttaacttgtaattgaataagtaatagtgaatctaaataaaatcactaaatgtttattctgatttcttttttacaatccagttcaaaaaaaactttttgttaatatcctaccggtgaaaaacatctgaaacctcccttcaaaaagttactacttaaaaatcatatatattttatggtattttaaaatgttaaacttatcaaaaggttaaataatgttgggaaatatattttaataaaaacaattgacctttctgacctattataacaagacgtgtttcattaccaattcattgagaaaaggaaacaaaaaaaaaagaatcccagcattcaatttattaagcaatatctacttacaagaaagtaaatgacataataaataagtcaaaattaaaaaaaaaaatttcacagaaaacacatttcttactttttgtttaaacaataaaaaaaaaacactatctgactgtatcctaaactgttaaatctcgtcatggtagtttaatataaactaaatgttttaagtgaaagatgtagtgattataatcgccttatacttataatacataaaatgttacaccaatactgcctgaacgttttgatagaagagcaagtttttactaattaaaagagataatcttacaatcctaaaaaaatgttacacaaaaactatctaaccttttgaaagcaaaattcatatgaatactaccaaatagaaagaataccaaaaactcaataggttttgataataaacttaatgatacaaacaaaaaatacaaagactttttcatagcaaataatcaaaatctaaaattgataattattttttacttttttagaaatccgatatttcaattgatattatgatacaaaaaaactaatgtaagaatagtaaatatccaaataatttgctactactaattttcgaaccaaaattatatataaagaaaagacaaggtacataaagaaacaactttcacattctctgtttaaatattttatttgattgtgctttacatttatatatattttaaaaagtagttgatatagtatccatatttttcttaacttaagtgctaagtaattctgattttttatttattaacagacaatacgaataataaaaattactctacatatttcatatttattaacaaacacaaaccgtccttccttgtttttatttttctacaatatttttcttcttgaaatttctttttcctttatatcactgaaaatatattgaaagtagtcgttaataaaaaaaacctaatgggcatattgtgtattttctaccatatcgataaaaaattatacaaaaaattaacatcaaaaaatattatggcctgattttatgttcgtcttatagcgtatctaaatcatagacaaaaatatacaataaaacaattaaaaatgaaatttctaatagactccagattattgcattaaaatttgcaatatatttatccaacaaccgcatattattatatgtattatcgttctgtgtcatgtaactaaataattttacaaatcattttcaaataacctaaaaaacagacctctccatttaaacagtttccaccaaattatcttagtgaggtgttgtaaactagggtttggcaattaggtttatctaaagaatagattaaaactgacagatgctaaactaatggaacaaaactagctgaaacactaccaaacggataggtggacaataatagattaattttgttggaaattggagcactcagcgtccatggtaatggtagacatcattaaattatagatgcttgttgtattgtgtactaaataaatgtatatacttattatatagtgtattcagtatacattcttttatttagtacacaatacaacaagcatctataatttaatgatgtctgccattaccatggacgctgagtgctccaatttccaacaaaattaatctattatatcaattattgtctcgattattaattaattattcatttaatatttctaacacttcccttaataatactaaatctgtaataacttcatattatgctgaagagcaactgtctggggctcgtatggcgcagtggtagcgcagcagattgcaaatctgttggtccttagttcgagtctgagtgcgagcttttatagattgtttttaagtcacgtgacccggatcatgggtataactctttttttttttaattcattttgtaaaattttttgccttgtgcggttttttaagaagagtttatttgtgacatgtggttttgcgtggtagaataataatttaaagggttattataacaagaatataggagaccttaaaggacagacaaacaaaaaagatacaatacattcttttctattttaaatatctattcttgttactattcttggtttattataaatcctatacctctatttatttatattatttcaaaattttttaattggcatttgtaatcaaaactagggttattacaggataacttatgtcacataagaaaaaattttgtgaataacttataataaagaaatactataatagttgagaagtttctactagatagacaccatattaattaaactattgagtgaaaactaccatgttaagaacgatcaacttatatatatcatataaacttagatgattatactctactggacttatccttatcaattgctggattatctttttaatatcttctcctacaacgttaaatgcaaactatctgtaattatattttggtaaatttatttttgagttaccaagaaaaggaatttaaaaagttatgattactataattaaataatacatcaattgtacctcaagtaaattctaaacaaatacatcaggtattagttaattttgtatatcatgtttttcatttttacctaaatctaacatgatgctaaaaaattcgtatagattcacaaaaactgtcattaaaacaactaaaatattcttgtcggtaatagtgctacacaaatctgattgcatttaaaatattaaaccaatgcatgttaagttctttgttttttgttcttttcttcttgtagagaagtttgaagttagtgtagatgtaaatacctaaagtaatctataacattagaaattaatcaagtattattaacatctgttttactatgaattacaaaaacaatttaaaaatatcaaaatctaagctttctcagaaataatcctttcatgactttaataatataaaaaataattcattcacacttaataactatcatcttatttcaatataggcacaaaactgctgttaaatctttcttactttttgacatttttattcatatgatgaagtaacgacactttttgcaatctatgtaatgttctgacaccaaccacgtacaaccaaatagttgctatcgcaccaataacagacgctcctacaaaaccatagttagtttcttctataaaattctccaaattcattccatacgcagccccaacaaaaattgcacaacctaatgataacaaacctagactaaatttaattcctaacaacattaattgattcctgttggaatccaaaataatattgatgatttcctcagttgttttaacgttagatattgcattctcacctaattgcaccaattcatcgatatgattatggtaagtttcaagcaacatttcaacctctgtatgatcatcctcataatgttcaattcccaatttcttatctgacaaatacatctcacataatacatcatcctgttctagtagatcatcaattaattctctcactaaacttgcctttttataaaatatactcaatttcttattttgaatcaataggagcctcaatttatctctcgtaatgctaaactccagatcatttaaaacaccatcggatactgctaacaacacttttaattcactggtcaggtttgatagagcagagataaatattgcttccaaagccctaaattcatatggtaatgggtctgatccaacttcatttgtagtgctattcttcaatcttgactgtaaatcattcatgaaggaaacatgtgcagaagaatgtagcgatattccagaaccaatagaattgaaagtaataaccatgttaggttgaatcaatgctttataatttaatagacttatcagtatactattctgccttactaataaacttggaaccagatcattctgttttgatttttcaatctttcttaaatctcttggtagcagcccatgtttagatacaagctcctctcttttcatttcattgaaagatttatctatattcccattaatatcgagtacagtacacccaataacacctgaaccatacccagaaagcatattattagcttgaattaggttcttttgcagcaacctagtagcagtaacatctgtcactattgaataatttcgaagacatttgatagcgattattgaagttaaatttgttctgatgaaggaagagtattgtttcaacacttgtgggattattgcattaggaaatatgaacttattgaaagacataacagaacatagagtatccacaatagaacggaaattacatatatattgtaggtttcggtggtaaatgttttgaatatgcttagatgttcattaagctcattgtatgaaaagaatattgttcaaacattatctcaacaattttgggaaagactgtttctaaaatatattgaaattatagaaaattccttaacgagaaaaacaaaaatatcaaatccataaaaaaagttaagtaagaaagtaaggaaacaaaaagaaattgaaactaatagtgattgttcaaaggtaacaaattttatgatactattattataagcgtagtctaaagacttttcattacaataaaataaagaaaaaaaaaagatggatgggggagataaataaattttgtattaacgaaaatatacaaataagttagtaaccactttatctggttatatatacccaaattataaaatattctagcaatatgttaataatattcctaaataacagtttatattctattatttgtatataattaacactaaaatgatttcaaaaccgactatcttcagtataaagcttagttaccactgtaaaaacatagaccatcagattataacaatttgtcgatactaatgggaaaaggaatgaaaaaagctcaacatatacattatattattatatacaaattgttattagtatgtttacacattttcatgatatattagtatgcaggaaataataagactttatagtacataatccaaaactcattggtaaaattaaacggaaataaaacttagagattatgtagcaggcaagaggtaacaaaaataaaaataaaaaaaaatatatatttctgtaataaaatagtaccagccatattctttattttttattttccttgatagtgtaattaattagtctcagttctttccctctttctttgttcataaatttcgtccacctctttttgtaattttgcttgttgttccatctgctgctcaggagttggtatgttaccttctacataatccttcaaagtgaaagtttgaccactcatcttttcttgttgaattctcatcttctccttttcttcttcaatcaatttcatgaatctaatatagttcttttcaccctcttcacgaatcaaatccaatgggaatttgctattattataggatgtagtagcaacgcctaatagacgtaatgcccaattaccttgtgccttcttttcttgttcttctacaaatttagttcttaatttattaacacggtcatgaaattccaatgggatattatatttatccttaaaactgtttaagataggcttaacatcggacacttgttgggtagctaaatactccaagaatgggatcaattgaatcaatttatcatcattttcaccttcccatggtttcatcgggatagcattctccggttgtagtttataagaatccggattagtgtcaatcatgataactttattgacatctctattcaatttggacaaatctttgatatggacatgatctttatagacacagtgctctttataaagattataagaaatgaaagcatgtagtggatctaatttctcagctattttttcgctgtacatcatgtaattggaagaaaataaaacaatttcatagtattgagataaataaccaaggaaataatcaacaccaggtctcttggcagtcctccaaccgttcttctgagtccattccgaatgaactaacaagtcttccaaactcaacacaagagttagaggtctttggtatgggggtggaggtggaggtggtaataaatctgggaatggaggttcttggaaataagtaaagatggaattgaatctagctttgaatctaccatacatcaaagaagcagtatagccattggctactttatcttttaattcctgtggttcattatcttcccaatctctagtcatatataacccatatccaccaattgcagagaatgagaaaatatagaaccaattagcatatctttctcttttgatttcggtggtagtctttcttgatttcttggatttctttgtttgagttccatcagcaccactctgttgttgattatcagcgtttttgtcatttgtttcactaaaactagattgtggaccattcttggtacttagggaaggatcatcgatatctatcccagctttagtcaataaatcatcagtcaaaatagattgaggttgttctgaagatttaccttgcttcttttgtaaaagaatactatttcttgtagaaattaacctcttgttactggcttgtaatgactgcaactttggaacaatggctttagaagcaaacaaaacatttgaagtgatggtgctggtcttaaaaaaattagataacatgacactaatctgatttaacaatagctcaaactatttacaagtgcaaccaaaaaaaaaaagcagaaaaaaaaaagaaaaagtgtaagtgaaatgaaaaagaagacaataatacaggaaaacagaaagtatctagtcaatggtttaaaagaagttctgtatgatattataaacttatttgttttgtgatgatgtgcataaacgtgggatacgtaaaagggaaaggaagagcaaaaggcaagtggataaacgaatgagatcaattaaaataggataaatcaaatatgtctgggatacagaaaaaaatcccaagagacaggaagaaggatagaatgagcaaactctgtagacaggttcgtctatattttttgtttctgtttgtttcctccaaaagtttcaccaaccatctttaattctgaagaaaacggtactctcttgcaatgtcacttccaacgaaaccgaaaatgtcgttgtacacggcacaaaaatgtcagtgaaggggaaaaaccaaaacctgaaactttctatttttttggtttgtctttcgtcttctgttccattcctttaatatgcatgtacaaatgtataatataggatattctacattacataacacaattcttctttgtatatctccgctgaaaaaagaatcgtcgtcctaccccacagctcataggcttgtcgtctagtacttgtcactacactaaccatccttaaaatatatattactaagaccagcaatcttgtcgatacttttgatgatttcttcttctctcagggaagggaacatagctgtataattaataatttagatgattgcggtaatatttcaacttcctgacattgaagatgatgtgtttagcagtatccagattcaagactaattagacagcatttgaaagctagaggtctacaatctctaatgaatcatgcaattaaaattggaatttattgcttagtataaaacatttagtatattttttatggatcaaaacttttgagttcaatcttaaaggctagcttcaaagttgtcatatttgttcatcttggttgatattcttgctaccctacaatattatgcatgagtaatggagtcttgtgctccagtaaatatgattaatagattcttgaacataaaaaaatgaaaatttagtaagagtttggaaactagtaggagatttggagagagaagaaatatgtatgtctgtaaatattctacttctactttatatatatctatacatacatatactagatcatatcatattttttttcctttttttgggtatttctttgactaacaaacgtaaataaatagataacacagtagatatatgattgcattaaagtttactttttagcaatgacatctgtgatatttttttggaaaataaaaaggaatcacactttcaagaagaaaaagaagaaaaaaaaagataataacaaataacatgtacattcttgtatatatatgcatacatctttcacacttgaatagcactgcactttgatttgtttcttcgataattaaattactaactatatctattaacaaccattcagtgggttcaaaagatgtcgggccttgcaccagtaaatttttatgggactcaaggaagtacgagagcgtttccagctgaattgtatagtgaagtacccctctttgatacatccattacatctcaaagaaaagaaactattgaaacattatctgaaatatattccatcataatagccttggaccatgtagagaaggcatatttaaaggattctgttgatacacatcaatatacaaatgctgtaaataaattattggctcagtataagacttatttgaatgatgcaaaagttagaaaagagttcaaggatttagatagttttgtgaagaggtataacattgtggcctccaatgccattataagacttgaaagaggtataccaatgactgtagagcatgccattgttgatgataatgaaaatgatgattttgacaataataatggtgataatggtaacaataaaggaattgatgacaagaatgacgatattcgttgcaataaaattaaagttaatatcaataaaaataagacatttaacggtaaaaatgttgctgaggctacaggtaactttattactttgattgatgcattgaagttaaattatagagcaaaggatcaactacatccactgatggcagaattattattaagtattaataaagttagtcgacaagattttgagtacaggcagaaattagtcgattggattgtgaagattaatagaatgaaagtagatgaacaattaaccgatactgagataagagaactaatatttgacctggatgcagcttataaaagcttttatacgttattagaatgatttgttattgttaaaataagaaaatgaaattcaaaacaaaaaaaaataaagaaaataaaaaacttgaagaaacaaaaatgttgatgtatctatataaagaaaagttacaaaacatctatcagattgtctttggagaaaggtagctaaccttttatcatgacctttcatagtattgttctgtatgtgcatcatacacacagtttttaaaggaatttatgcttccctaaataattaactttttttttaaaaggaaactgatgtattttattagtttattgtattacggggattcttttaggtggtacgcatgaattatcataaataatgttaaatttattcaaagtttgcgcatcataataatatactacagaaggtaagcatggatactctaatatataggtactactagtacagccattgctattaccaccattaccactgttattattattattatctattttcttttttataatactaccaaatttgccataaaatttttgggcaaagtatgcagtttctttctcttgttgtatcaactgttcaatatattttaatttggagcgtgaccaaggggtcacagtcaaattttggtttatctcaaatcctctgccaccactaattttaaatctcatggttagtctatgagtaatattaaaaaaattacctagtgtggtgatagaagtatgatattgaaatggaatattattatttttgttttgcaaaaaaatagtattaatgttagagttcattttgctataatcattattatattgaccattatcaccatatctcttatcaacatattttggcaatttatataaaaattcaggttcttgaaaagtcgattcaaaacttttaaagaatctattctttgtaaagattctaagatcacatgataaacagatctcattcattgatatcacttggttcacttctctggtcagtacttgtaaaacattctcagtcttatttattgatgataaaaatgaaataggatttggcatttttttattgttattattactgctgttattatatatattatcattaatctctaataattcttttaattgaaatgtaatatgtttcaatttaatctttttattaaacaatattgattttttttgagattgttcagatatgtatttgacattaggtttaaaagtaatcctcaattttaataaatcatcattactgagacatggattttcaattttatatttaactttaaatctattatctaacatatctacagttctttccaaactaggaaagagtaattttgatggtaataatgaatatctttcaatattaatcaaatgtttgaaatcttttaagtcattaccattgaagaatgctttacagtcaaacaatgtataacaattcccaaatttatcgttatagtttgtttctttaatatcatcaggtaatgcaatagtcagtgggatatcaataccaataatttttttatctttaccatcattcttaaaagtgaaagactttttataatgaattgtaatgcattctaatttatccttcctttttttcaatgaactattacggaaatttatactttgtgattcaaaagttgttaatggggatattgaatctaaatacatattattgatattatcattattaccgctactgctattattgtgattgctgccattaatgttattattattactagcagtagaattatttgtatcattatgcaatgatacaaaatttgttagatttaaatgattgttatgatgtaacgattctacagttaataacattatttctaatttatctattgtgaaaggttgtccgttgtttgatcgaagctgcaattgacattcaattcttggtaacgtttcgggtatccctggacaaccccttaccacggagttgtaacttggtttcaaagatattacagggtatccagacattggatatagaataatacaggcatgtgtggggctgatttatccttatttagctagttcctttctaaagaaaaaaagatagaggatacaatagcatagtttatacggattaaataaattcaactgattactactatttggtaatttgttaattcttgtatcatgtataagccctccaatttgtctcttaattgattcacaaatatattcttagtcctattaaccagtttacttcaaaaaaaaaaaaataaaaatgaaaataaaaatgactcaaaatctcttcacaatgagaaagagcaaaaaaaacaatatgacatagcaaaaaacaaagtgtcagatgtgtgggtaatgacattatgaataatagaggaatgtgtagatatgaaggcagaggacactaactgttattccttaaataattttcttttttgtttattaaaatcagatgaaaattgaaatatttgggtgtagatagaaagattctggattacatatcaaatactaatttcttttaaaaagatgaaaaaaataaagacaacttacagaaaatcaacgtttagtctacaaacaaaaatggatttttttttaattgtgccataatttgaaatatatttgcacgttcagttaaaattggcatcctttcaaataactagcaggcagagaagaacaaaccaaaaattgataatattttgcgaagacacaataattagaagatatttcaaaggataaaactatttttcaaataggtattacacgctcctttgataaataaatactccatataagagaatacaaaatgattcattattaccgcatgatttattaatataaaggttcagtatcaaaaactttattaaacttcatgataaaaagatataaacttataataaaatattaatagtgtttataagtttttggtttactcacaataaaatgttcatactattatatctctaatttatatttcaagactcttttttatcctacatacccaacatacaaagtataatatacacagatgcaacttatttcattttaaaggattctttaataaagactttaataactgtttaattatttaagacaataaaagtaaattagcaaagatatttttaatcatattgaaatatgattaaaaataaataaatgaattttacgtgtatcttaaataagtttccttctatacccgattgttgcacatttatcttcaatgttttaacttcagagacatgttccaaccaatatcacatatttaacaatgtttatgctgaaatagggcattttagaataaaatgaattcgaataatgggattttagtagataccagagagaagaaaaccaagtaattattgttgaaagaaattgaaaatatatccaatttaccaaatctatataagcgctaatttacaacagtttgtatatataaacgaggaaaggagagaatagatactaattaactagataaatgggtatatcaatgagaaataagaacactatttgcacatattacccagtacttattattctaatacttgttctcattgagcaaaccagctgtctgtccattattttttcttttttcttcttaagaatctatgtgtgggtaaaagtctttggcacacccgtaaccatagcgacagatatagtatccatctaatttttcctttttcgtttatattaccaatattattaatgttctagtttgtgattggtcgatctttgagttgttcccactcccattctgctattatttgtcaaaaaaacggctttgaaaaaaaaagaaaagaaaaacaaataatacaatttgatatagtaggcacacattgttttcccaaacttggctagacggaaaaatcaatcccgtaagaaaaaacaaaataaaacaaaacaaaaattattgaagctaaaaaaaaaatacaataaagaaaaattttttttctaatttcatatatttcatctctatggtaaccaattcaaattaagatgagatttttactgtcttgagcattttagcttcaatggaagattatatatatataggatgtagaagatatggatatgtaccagaaatgttgttgttttccttcccagtattacccttttctgtataagcttccctcaattctacagacatactgtcctaccaaaccgttttttttttcacgctgaaataaatcagcaacccacagacgcagattttttctagaagtacacttgtttttttttgatatagagtttataacatataataggactgaaatgtttctaaaacctagtctaccaaatatttgcaaattaaatatatttcttatatctgttggtttcacattaccatttgcagtctccatgagggaatcaataataaacaataaattgaaaaattctcaaggattacaagttaaaggtagatcaagaccaagaatactttgttgaaatgcaaaaccataaacaaacaaacaaacaaacaaacaaacttctgtctatatcacagatccttccgcttgatataatttataccattatctttatttattctattcagttgaacttttgttgttttttttttcgaccgctttattataagtgaaatgatatgaattacttttcaaccattattggctcttttaaaatgttgcattttttcatattaaaaagtatctatctatctatctatttatttatacattcgattatttatttattatgcattttaattcaattttgttattaatagtttaattgttcttttcatttatttttcatttgtgattctgtattataatcccttggatttgttctcggtatacatcggagaaatttctattaaccttctatattttttttctactcaaaagaaaatctatataaccttcctcaaggaaaacttctaaagattaaatatatatctatactaatggtttcacataagtctaaggtcaagagggaaacaaagagaaagtgatagagaaagaagcaaaaaataaacatatatataaaaaagactattctgaacatctgtactatgacattaactaataataatacatctatacatccaacgaaactatctattgcctcagatgtaattccatgggatgatgttataaaatatatcaataaaaaagaattatttaaattaaaaaggtccaaaaaacaaacggatagataccataaacataaagatgaattgaaaaaacaacatataacagtctcccaattcatattgcaaaagattttaaaatgggatgctaatgaaatttatgaattaaatcatataaaatatgtaacggcccaacaacaattaaagacgattttaacaaacaaacagttatttaaggtcacaatcaacgattttccttacaattatgaaccaaacgttttacatctcttgatttggtcaaagatcaaattaccaatttatataaatgacactacagatatcgatggtatcaacattgaccataataaatatcccgatatgaacccagaatgtgagagactcattgataagtttttgtcgaagactttacatgacaaatacaaactatcatacggcgatgattatgtgtggtttgtcaattatttgagtttacaaagtattaaagatttgtcacatatccacgttttaatcaaattccattctgaacaagaaaaattgaagatggccaatatcttgactcaagatggacagttcagatcattagtagattaaagggagatatatacatattccttaattcattagttaagtcagagtaccactataactataagtaacaacaataataacgtttcctttaaaatatttaaactttgtattttctatcttacgcccatactttcatagtaacaatcttatacatatacacatatacacaagtagtataagtagcattactgctactatctctttaacacattttaactcgcataactttaacattaaccaatacataatttgaatcttcttcaatatttcttcttcttctctctttttttttcttttttttttttttttttttttttttttgcgtatatgttgattgaaaaatgatattaaattttctttgctgtaaaagaaaaaaaaaatatatgagaaaaaaaattctatcttcatttcttggatataatggaggtataaaaaaaacaatttcaatagatctattcagtaaatcaagtatcgatgaaggattatacagtaaatcatagaaatagtgctgtatagattattgcaagtattctatcgaagtaaaatttacatgtacaaataaagttggatggaattaagaaaacgtaaaaggctggattatgaaaactctttatcaatacctcatctagaaagcaacactaaagaagacattcaaattaaacaaaaaagaaaagaggacttatctattacaaaaaagatagctcgtagaaaatctgtagaaaagaaaaccaaggaagtagagaatgtacaagaaaaagaaactaaaaaaaaaacatagacattaaggaagaatcaagagaatcgaaactaggcgatataaatcaatcagaaaaaagttcagtaaaaaagttaaaacataaaaatacgacagaacctaataaaactactgtagacataaaaagattgaaaacaggtggtccccccattcctgatttatatccggctactatgaagacggcaacctcaacagacaatataattccaacttctcctattgattccttactcattaataagaatatcttgccagataacatacaaggtttaaaacatatcattaataatgtctccttgaagagacctgctcttaaaactgtcgattcacatcaagatataaataatattgaaacaatgccaattgattgtttggaaaactatttaaaagatttaaatcgtttaatcaaattacaacagaaattatattatcaaaatttacagacccctcgattgctaggaccaaagcattttaaacatttaaagttccctgatgatatgataaatttacgaaagatttcctataatttggaaaaaatagtgtcataccgcaaactaatagataaagaagacggaaatgccagatctcatgattacatcaatgatatttcacagtattcatctgtgttggatcaacaaaaattgatttctattgctaaacaggaaaatttggataaactaaatgaggaagatgccactttgttgattgcaaatatccatgggattgattcgagccttgtaagggatctaaaatgtaataatttgtatattaatgggaagattcactttgatccagattatataaatatgagtgaactcaaatcaatttgtagaaaaatagataaacctttattgagagagaaaagcaataatctatcatggccttctagaatgaggaaaaagaaacataaatccaaaaatagcgacaataatgaagaaaataatacaaacatagatacagacattaaagaaaagcatccttcatataaatttcataatattccattatttaactccatttaatttttatttttatacacatgatagaaatagttattagttgtaaaaaaaccttgattgggaatcccggaatacgtagtctatagataatacttaatctcaaggtaaaggagttagagtaacgaaaacgtttagatgacgctgtggatgcattctactgattgtttaattaattttagtgaaaaaaagtatttggaagttcatttaaaaagatctttgatttttgatcgaatatcaagatattcaaaatgagaattacattattgattttataagttagaatcaataactatattatttataagtgtttatatgtatatataattaataaccatgtcccagatgagtatttaagataacctcttacaatatataattttaatttattttatttttatgagaccatttttcaaacaaacaaagctattaaatcataaaaccataagtattaaataattaatactgtaacttttaaattttctagagacttaaaatatataagagtcaaagattggaaagttttttctacatcaagaatttcaaatttaattctcttattaaagatgaaaactcaaagtaaagcttacaattttattaacatagaattaaagaaaaataatctcttatctcttatctttacaaacatctgataaattataccataattattactagaagaagtgggaatcataaaaatggtttcatttataaaaaaaaaaagggacttaaacttggttataacgcagaatgatagtaaaccacaaggaaaataaaaagtgcacgtgaagagcctataccaaataatttatttactgattttttgttttgaattttaaaaaacaattaaaaaaaatttttttctaaatagacaaagtaaacagaaacaagcattattttttttaaaagttattgtgcttcatcaatatattaatttttatttttgcacaaaacaatttgaaaaaagaaaaataaaaagaaaaaatgatatcatatgaacaatacagagagaaaacaatacaaagaaaaatagactattgttttgttccattctttttctcttttttccgatccgatccgatccgtttaaacgaaagatcttgaaaacacgtaggagaattcttttttgttttttttttcgccaaaatttttcttcttctaaaaaaaaagagaatttccttcaaaacaggagaccgtcttaattaatattctaaattcttctatagaatgtgagatttttgcatggaatgtacgttttattttgagattaaataattattattttaaaaaatgtgttaacataaaatactaaagtaattggtagttttttttgggtcaactatttgatttaaaatacgttgaatgtcaaacagaactacttaaaaaacaacaacaataataatgattaaaaataagtatttttaaggctctaacttgctgttattaattgtatgaaagtatggtgagtcattcaaagtaaatttagttgttttatatctatatatgtattttatattgataaaaatcattgttaaactaagaatggaaataggacaaaagtataatttatgcaggagatgtttaagtcataataaaaccaaggcattttttttaaaaaaaatcttcgtcattacatgttttcaggctttttattccgcctaaaataaattgataaaaataatgttttcccgttcttggttatgacacaaaaaacaaaaacaaaaaaaatactgtttacaatagttgaaaaatggaagaaaaaaagcccgccgaagaaacgtaagactaaagttaaaattgagaaattgtatagtaaagataattacaagatgtcttctgcaaactcctaacctcaaataatttctaaagttacagaaatccaaaatattattttccttttagtcttcttttttttgtgtgtgtgtcggtgttacattttacaatcccttttttttatttgtaatttttttaactttaaatttttcttttttgcttttttttttcagggggtcggcacttttcaaatcttaattcaaactagcggtttttttggtcacgaggatagacaggcagaagtaaaaacactacaaagaaaccttttttcttttttttttttttgtttttgttttgcaaagagccaccaatcaaaaccatacagcgcactttgaaatgtctacaaaataaaatgctttataccggagatgcagagtttaccaagaagacacaaaagcagcaaggagaaaaccaaaatagtttcttttttgtttttttatttcatgcaagctaagaaaaaaaaatgaaaaggagaaaaaagaaagaaaattaaataaaacggaaaacggattttcctaatatctccacttttttcttctttcaattttttccaagcctaaaaagaactgataaacttaatacaatacaaattcttcggtattaagacaaactttaaaataaaaggatcccttttcattttttttttttcattacgttttttgccaactcttctacttatttaattttgtttgatagattataacatgtcttcatttgctttctcctcgttttccaagataaaataattaataatgtctacaaaaaaaatttcttttcgtgcatatcgaaaaggtccgagctataaattataataagatcggtggtaataataatagcagcatatacaagtatgagaagtgtccgctcttttgttatttttttggttttttttcttgatatttttaatcttgatttatagtcataaaaaaaactactgatcaacttttttctgttgtaactacgtgaaagccatcatagtagtcataataacaatactgaaaatgtattgtattgatctgtctttatctttttccttttgttcttatgtccctattacgtgtttttatgtccaacattcttgtttatatatttatatataaatatatgtttaaatataaatatatatatatatatatgtagggctgagatctttctgaaagttttatcctctttttttttgtcttgtcttttttccttcggcaaaaaaaaaaataaaagacgatgaataattatttactagaaagttaaaccaaaaacatcacataacatcagccaatacatcatacagcatattatagattaatcaaataaataatcatatgtctcaatacgttgacaactatagtaataatagaagtgatataacctcaatagatcaagatactgtgataatgacgaacaagaatgaagaatcatcttcaatcccaatgagcatgtctactaccccttcaaaaaaattggtcaaattgacaatgttcaatagattcttaggccaatttgatccatttaacttcattttcaatatgggtataggtatttcatctactctgttgtactcgttcccctatcctgctcattggctggagatatgttcttatataatgtttgctgttaatgtactattattcattttccaacagttcatgtttttcctacattttatttatttctccaaaaactattcaacaaaacaatattttgataaatattttagaaatttgactaaaagtgtcttttggggaacctatccaatggggttagtcactattattaattatatataccttctgggtaattatttctacacaaagggaagaatcgtagtggctaaacgaatatttaggctggtttatgtcctttggtggtatgatattgtcgtatctatgtttattgcatgggggatcactttcttaatttggcagaattattacttccaagacggtttaggtaaatggaacttcaaatttgaaaaagtggccgctgaacatttgaaaagtattttgttattagctgtcatcccattagttgttggttcttctagtgtctctatctttattatgtccgatttagccactataacattgaataggaatgtccaactattgactatggttatcgctactttgctttggttacacgctatcatatttgtctttattctagtcgggatatatttttggtctctttacatttttaagatcccaccaatgtctcaagtgtttacaatgtttcttgttttaggtccaatgggtcaaggtgcctacggtatcctactattgacagataatgtccttctctatacacaagaatactattcaaaggatccaacaaacattcttttgctttctgtaccttggtcctttaaagtacttggcctgatattaagtatgtcgctattatcaatgggttatttcttcactttcattacccttctagctataatctcatattcaaaaagaattatgctggtgttaagggtgacaacacacgtatctatcatttccatcaaggtttctggggtatgactttccctatgggtaccatgtccctaggttcaagtcaaatatacactcaatacaatgagtatgtcccaatgggtgcatttagagtcattgggacaatatacggtactgtggctatcttatggtcgattttctgttttagtaacactttaatattgtatggaaaaagatcatataatgcattaacacaacctgcacaatatgtcccagaaagttctgagataaaattggagcctattgtttcacgtgcacaaccagagaccgacttttcgtttatgagggaagaggaaacagaagacgaagagagtcttattgatgatttggaaagacaacacactataaccaatgccggtttgtttggaagatccagatcacatacaatggggttgacaatatcttcaccggacagatcaaatatgcatactttgtctcaatcagaaaacagcataaacagaacaagtactgcaccaccctcgttgagtgcctgaacaatgattcaattattatgaattcgcatcttttttatttatttacttttgttttgtttttccttccgttgcatttaaacactacatagtaacagtatattataatgtgaatagttgtataatattatttatatctaattagaataatcattctctagttattatcttattcttaaatttgtttagtttttatcattatcttttcaaaattttgcaatgcttgggctctcgcaatttggaaagggtacatgtaattccgtttgtactatgcgatctttaaaattgtcataatcatgatatcaaaaaatagaaatcttaaaaacagtattaatacagtgttgttctttgaaggttttcattaattaacatttgatagattatccaagagagaatgtataccttgtgtgcagtgtgaatattgatagataactaaaagtttttttttttgacatgtatcaatagaattaccgatctgtaaaaattttgagaatataagtatatatacggcttatcattgcttttgataacttagtttgattcctatagtgtacataccatttgctattttttattgttgaaagtagaaaacaaaaaagtagaatcagatattatataacaaaagatcgatataactgacacatcaagttcatatttaaatttattagattccccttctaatttgaaaaatgaaaatcccaaatatttttaagctaatttgacccatattttttgtattcgtgatgcaagttggtatatcttctggtttattatatttcttctcatagcctacacattagttatatatatgctcatatgtttttttttcatggtttccattatatgtgctgctgatcaatcttatctttctttgatagataatacaaaatataatattttactaatcttggtccttgagtgcttcaaaattacgaagatgatagtatctatgagaatttctaccaatggaatacctttttacaataatatcattaacagttattgttttatattttaaaagaaaagaatatacaaacaaacaataatcatcattaacagcagcaacaaattgtgtttattatttctaccaagagttttgagaaactgctttctccataagagcaagatcatgaagatcctacgtgtaatagaattcaatatgacgagtatgttctagttggaacattaagaatcattagtagcgtacgtgcgatcgtttgtctcttgtaaatattacatcatcttattgacactatgatactctaaagcaaatataattgttacacatataaaaatagcaattctttgatatcaattaacaaagacaaactgatattgaaatttatagtggctagaacagatcttaagacaaattttttaattataaaaaaaggacgatactggtgaatcttcatcctacgaaggagaattaggactaaacactaataatggcctgacctaatttattaaacttgatatactaagtaaagtatccactatatatttgcgatgttcaacagggacttgtttaacctacaaggatggtatttatgttcatttacgtaggcacatacacttctagccaactgctaaatgaattttgtatatttattacgttagttatttttgttttggtgattaatctttagtgtatctatgtttactcggaacaaaaaacttttttttcgacctatttcattacataatacacaagtgaagggaggaaaagatccgttttctcgaaacaaaattggaactatatataaatatatattgagtcgtattgataacaatcaaaaactttattctccttttatttttgacattggtacgtgtgcgccttctgtgataatactataataacttcagtcattatcttttcttacatgaataaaacaataacaaacaatatcctgaaaaaaatggctcctatcgttaagaaacattacgattatatcgttattggtggtggttccggtggtgttgcgtcatctcgtagagctgcctcttatggtgcaaaaacattaatcattgagggaaaacgtcttggtggcacctgtgttaatgttggctgtgttccaaaaaaagttatgtggaatgcctcagatttagctactagggtgttgcaagctaatgaatatggtttgtttcaacaatacgcattaactaaagaaaatttgactttcaattgggaacagtttaaagccaaaagagatgaatatgttaaaagattgaatgggatctatgaaagaaatttgaccaaagaaggtgttgatattgcttttggttgggctaaatttaacaaagatggtaatgttgaagttacaaagaaagataacactgtggagacctattctggtgacaagattttaatagccactggtggtcaaccaattttcccatataacgttccaggttatgaacatggtatcagttctgatggattctttgaattggaaaagcagccaaagaaagttgttgttgttggagctggttacatcggtgtagaattagctggtgtcttccatggattaggtacagagacacacttagttattcgtggtgaaactgtcttaagaaaatttgatgaatctattcaacatactattactgaccattatatccatgaaggtgtgaacattcataaaatgtctaatgttactagaatcactaaaaatcccgaaaataaaaaattgactgttgaaattaataaaggagaaactattttagaagacattgatgagttgatttggaccattggccgtaaatcattactaggtcttggcttggaaaatgttggtgttaaattaaatgaaaaggatcaaattatcgttgataaatatcaaaacactaatgtagaaaatatctttgcattaggtgatgttgtaggtaatgtagaattgactcctgtggctattgctgcaggtagaaagttgtctaatagattgtttggtccaaaggaatttaagaacgataaattagattataccaatgtgccaagcgtagttttctcacatccagaagctggttccattggtttgactgaagctcaagctgtagccaaatatggacaagagaatttgaaaatatataacacaaaattcacgggaatgtattactcaatgttaaccaataaatcgccaattagatacaagttagtttgtgctggccccgaagaaaaggttgttggtttacatttagttggagatgcatctgctgaaatcttacaaggtttcggtgttgccatcaaaatgggtgccactaagaaagattttgataactgtgtggctatccatccaactagtgctgaagaattagttaccttacgttaaataatataatcaaaatacaataagtaagtagatataaatattactaaataacaactacaataaataagaatatgcaaaaaaataaattttacaatcaaatagagactatttcccatctttttgaatggtgtccaaataatcaatgaatgaaggaatttatatatatatatatatgcattcaatttttattatctttatctagtgtaggagtatctatactctctgtttttatattatttacattattaggaatatttgtggtagtggtaacactagtagtagtattagtggttggtgtggttgcagtagttaatgtctcattctttctaacctgtgtatctggtgaatttatgtcacttgttgaaaaattgaagaatctattagtcaacggggtctgtccaattcctatgtatggagtaagccctgtattaccattatttaaatcatatccttgtgccactaatactagcgaggatgaggatgaggatgatacatcattcatattattacttctattattgttactattgttatttatgatagtggagttagtagcgccaatagtagtacctatattagaattagatattggtgtgcttgcaatactagtattattagcaagacgaataggattaggaggtactgtcaatttagctcctgcgctctgtatacctaagtttacattccaattcgagaaaacagtgggtgatggaatcatcagatcgttgatatatttagaagataatggacctgataataaagaagtattactggtgttattgttgttattgttattgttattattactgttgatattagaagcatttccattgtgaggagaagaattggaagtggatgcaagggagtatatagaagataatggtttatttggtatgttttgttgaggatatttttgagaagaatttattttatttatattcaattttaaaccaaatttattaatcccattctgagtatctgttggagtagctgttttggtggaagcagtggtagtagttattatattattagtgtttgttctgatcaatgggggatgaaagttagaattttgtaaaagtgtggcaatatacggagacatagcggagagcggtagaaggccattagtagaggagaaagtagtgctactattcggcatttttaaagcattatcagtagtgttagttgagttggtttggttatgcttcagtaaatttgatggatcagaatttttatttaaaatacttgattgtttcgaaaggttaatgtgttgattatttatagttgttatgtctgaagacaacattctataattttgtggagacgtgttaccatagacatttggattaatatcggagaattcatttttgatggaatcagctgaacttgttgtgttattatttgaggtattgtttattgtcatgttgctatgtggtatttgcactcttaaaattggacgagaagatgattttttatgtgaattggaagaagacagagaagatggattggaattggaattggaatctgaatttagcaaagacaataattttgcatcttttgaagtggatgaagaatttgagtcaataacatttgatagagaatttttggtgcctacagtgttagaactattattagtcatgatagggtgagaagtattatttaattcaactctaaattttttatttaagtggttaggattagaatgggaatttgttaataaacttaaggatctcttggatttgtggttggtcatactttttggattagaatcagcacttgctgttgtttttgtgctgttgttaatggtggcggtagtagtagtaatatgatcatgatcatgattatgaatacatttctttttagcaaaattttttccataaaaacttggatctctaatatcgtgtaacatggatttatcattttgataatgatctaataaatcatttgtatcgactgaagaaaattcatagaaagtattattatggcctaatataattaaagccacatcaacctgacacaatacggccaattcatgtgcctttttgaataaacctgcttttcttttaatgaaagtgacagttctatttctttcgtctgtaataggttcaatttcaatttttcttctacccatatttgttgataaaatatatatatgtatgtatgtgtgtgtgtgtttgtgtctgcgtgtgtacgagataatagttatatataattgtagaattaagagttctttttttttttacttcctctcactatggagaaatggggaagacaaaaatgagtcaatagatttaatgaatgtatttgataagatttgagtttcaagtatcccacaaacaaaaaaaatgtaagacagcgtcagactttatttttcttttcttcttcttcttcttcctcttttttttcttgttattgttgttgatgttcttattttgaaactttttggtatattttgttgattgttctatttgttctataatagtggttactacagtatataatataaatagaactggaagcgatctgttgattaaagttttccatcgagtggatctattacatgacgtatcaaaacaggttaaaaaaaatatcttattcttctttcttttttttttctttttttttctctttcgatagaaattttgtggattttatttaaatttcttgtgtttttaactttttttttgttcgcctgaagaaaagaaaagaaaaacaaaaacaattaaaaaaaattgaagagattaaatttccccttttggaaaagatttggttactaaaaatagatcataacaagacaaagcctactattatgatattattattatcattaccactacaactaacaactactgatgcatttcttagcattcgacatacccatagtaaagacttattacctaatattgaaatatttctatatccatgcatcataaacataacgtaaatgtccataaaagtctgtgagatttgacactatagtaataatgtactcagtgtctccccttgtttttttattggatgtctatcatgtatacattctatacacacatatatgtaacatacatatgtatatgattcaaaggagagacattcggcggccacgaagtgaataaatcattataaatgtgaccaagacatttggatagttactagttaagcagggactagcttgtgtttttattttgtttttattttgttttgttttgcttttgcatttttttctatatctttatctttatctatataggtacttgaagcgatatgaatgtttcaaaaaaacagagttatattataaacatgtctgctaacacaaaaagaaaagaaaaacagtccggactcttatatccacaaactgattagactacattactaagcaaatgttcataagaagtaagaagacatcattagacaaacccgatagacctttcctcccttcttccttgaaatctaaatatatcaaatttcccacacacatacacatatgcgcacatatacacagatgatcttctgtctctttttgtctcttttgtcttgtttatccctccggtctggctccctccatctctctttctctttttccctctgtgtttttcccttccctttcctctcgccccccttttcttccaagaggtatttccgaaaaaaataaaaataaaaaatataaacaaaaacaaaaacaaaaacaaaaagaggaaacccaagcttgaacgagcataagaaagaaagaaaagaatagtatgctattgcagtgaatttttccctctctctttctttgtgtgtgtaacgttatgattacggctttcttcagtttacaaatgaacgagacattattaaaagaaaagaacaaagaaaaaaggagggaataaataaagacccagtgttagtattggtgaacagaacatatctcatggttaatatcggtctaatctatgattatcaaatcaacgttaactaacttcgcaaatgtctgtttgctttaccttcttatttatttattagtcacctcgcaaatcttatatatatgtatgtatatatatacatatatatacatatatacttcgatccttagccttgtcttctttctttttcaggtctcatacgatgtgtctatccagtcttttgtctttgaattcatctgtactattgtttttctttttttttctcatttctttctatttttttctatcgactgtctcgtaggtagttaaaaacacgcaagcttaaacacacacgcacaagcatagatatatatttatatttatatacacagataagtttacgtgctagcaccaataataacataaatatttacaagtatatcttaaaaaaatcctcgaagctagaaaaaataaataaataaaaggactacaagattattattcgtaagaaacagtttataatgtcttttttaaagtggtcttatccaaataaaccagttgatggatattggggtccaactacttctataatagattggtgtgaagaaaattatgttgtatctccatatattgcagaatggtcaaacacaatatctaactccatgtttttacttactgctacctattctacatggtgtgcctatcgtaatggattagagttcagatttttattaattgggctaggctttgcacttgttggtgtcggttcttggttgttccatatgactctgaagtatagatttcaactactagatgaattaccaatggtttatgctacttctatacctgcttggagcgtcttttgtgagtttaattggaagacttggagagctaaaacaaaacaagcctcaaagaaaagacaactactctttgcattgactgtcttctcatttactactattctaacttacatgtatctggtatggcatgttgttttgttgtttcaagtactttacgggattctaactttgactgtggtggctatatcaagttcttttgccatctttctagagactaaagatcctttggttaaaaaaaatctttatactactatgggcatgggtattataactttctccttaggttttatcttttgggaattagaccaattgttttgtcctttgtggattcatataagaagagattatttgaagctaccattgggtgttctattggaattacatggttggtggcatcttttaactgggattggtgtctattcttatttggtgtttttgcattatttaagagtattgaatctacagcaaggtgatcagttcacatttatttggagatggggagttatacctgaaattattaagaatgatctcgcaattaacacaaattattctttaacattctggggtccattcgaaaaagagaaaaacattgatggccatagatctattccaaacgataacggttctaatgctaatagcaatactaaaactaattccagttctaattctaattctaatacagagacccaaggttgatgattattgattaattgattgttttttttatttgatgtttcactttattttattctttaactatgaattttgacatattataatatgcaaatcaatgccattttgtgttcatatttttggctgttatttttttttgttctttattttatctgatttttttttttgttattattatcatacctataaattcattcatatacatacatatatatatacaaacatagatatatttatcatatattcatatttaaactttaaatatatatatttttttaaagtaaataaataagcaaacaaataaatataaaaccttttatacatcataaacttcacctctctttcttttccctttttttttctattctttatttatttatatttttttttttggtttctaaacacactgtatatgcatatactatatatatatagatatttcttaaacaatacgtttggacatatatgggccatccaattcatatcctaattttgcataataatttctgacaccaacacccgatatgacggataatttctcactaccatgctcctctctagcaattctttctgcttcttccatcaataacgtaccaaaaccttgatgttggaattttcttgggtcccttgaatgtagtggtactacagaaccataaacgtgcaattctctaactatagatgttctctgtgatgtaaactccttacgatatgtatacttagatgagcatttccttaatcttaataagccaatcaatatatctttctttggatcctcatatgacaagaaggtttcccatccaccatttgcataataatcccttctaatgagttctacttgatctggtgatactttatgatgcacttcttggataccaacttctctggtacgaacatctctacatgtggtaccaaaatctttcattctagctaatgccaattctcttagattaccattatccacaccagatgtcaccaatggcattggaatatctctttggacacgatagattctcgtccatgggggcactagtgcaagtatccttgctacaaggtcaactaatgcattagcattatatgatttatatctacccgtcttccataattcatataacccagtacctctaataactaaagttggatatatttttaacccatcagtcctgaatgcagggttctcgaaatactctttgaattgttccaaatctctttccataccaacattaggtaaatctggcatcatatgtgcaactactttatacccagcatctttagccagacaaaagatctctgagacagctttcacagtatggcctctgtttgtatctcttgccacatcctcgtatacagactggacaccaatctccaatctggtacagccataccttaacatatcatctaaatgggtctgtgtacaataatctggtctagtttcaatagtgatacctacacacttggtcaaactttgttgagagtaacggatagcttcatctaaatcatgaccattaaacccagatagtgcattatgtaattgggtaataaaatcttcacgatattcagtgggcaatgacataaaagtaccacccatgataacatattcaactttatcaatagaatgacctaattgtttcaattgttctactcttccacgtgcctgttcatatgggtcatatcttgccctaatagcacgcatggatgttggctcataaccagtataagattgtgttgaatattcaaaatcggaatcaggaccaccagggcaataaacacagatattaccggtataggcaatatgaggacaacgatgtggcttacacataacagcaactacagcaataccagaagcagttctgacgggtttggctcttaatttgggtagaagatacttcttatattggtcaggtatggagttgataatatcagttagtcttggttgttgtttcaatttatatttctttgaatatttggtgatcaatccattcaaattgatttctctcgtcgacccatttgttaatgattgcgtcaattctaaggtgacatcactacaacattggataaatctttccttttcaggtgctaagttcttggtttggttagtctttggacctttcccacggcgacccatctttcttatcaatttaacgttatggtttacttcgtatttgctatcgtttgaccttttttctcggtttcgtcaaaatttattagccactggaaatttgttttcaaagagtggcataatcgtatcaaacatggttgtcactcccaatatacatcatttgatatacaccagctaaaattacttgattatccatcgcatcttcccattttgtttggtagagccctttggaaaattctcacgaaatttttcaaagatttctgtctctcccggtctttttcgttcatgatgacctccaccgtctggaaactaaaattggaaaattcctttagaaaaatataaaaaaaagcattttaacgagagccaattcattaatattatttataaaacttttaaaggatgcttagcaagaacatgaaagaaggaaatgggtataagtgtataaagctaatgaactaaacacaacatacaaaaaaagagacttacaataacgataataataaacatcagtccacaaattgtataaaatatcattagctcaccgaattttattttaattttctttaacgtcttgatctcgattattgttatttataaaagaaaaagaaagtatattgtgtggatatgacaccggaggcaaagagaaggaagaatcagaaaaaaaaattgaaacagaaacaaaagaaggctgctgctgccgctgctgctgttgctgttgcggctacgacaactatcgttgttaacacaaccgttactgatgtgtcaacaacaactgcaggtacagattcagctactactgaaaataatactttagatttgacaagcagcacagtttctgatgaaaccaatgtaaatacaagatctaataccccattaaataaaggtagtactattcaagaagagaaagaggaaataacaataccagaagagaaagaggaagataaaacaaactttataaaagaatcagaaatatctgttgaagttgttgaacaaacatcatcggaagttggatcacatcaagcaccctttgaaaaggatgtacaagaacaagaattagaatttcataatgatgtaaatgaaactttaaatcaggcagatgatgctcagtcactaaacgaatacaatgaagagggagttgaaagaattgatttaagtgaaggggttattgatgctgatgattcagaaagtgagcttatgcaacaaggcaatggtcttaatgaaacaatggacaaaataggggaaaaacagaatgaactcagcatggagcaatttggggataaaatagtagggcatgagacattcatagacaatgaacacacccaaaacaaagtacagtttactaattcgtcaactacagatgctaaagagaacgtacctctgcctacacatactgttatacaaattgaagataaaacatcccaagaagtggaagaacaacaaatgcaaaatcatgaacagttacaccagtcaactgtggttaggctgaataaagagaatgttgaatttcctactataattaattcggaaggtttgggcacagattctaatataagtaaaaatgacaaaatggattttccacataaagaaagtgctacaacacaacctgaatcattttcagaaaatcatcttactactcaagaattcataaatgatgatttatttgaatcaagtccacgtgatgagttaatgccatgggaacagcatgaggaattgtatcaaaataaagacaaacaatatcatcacaatattgctgatgaacgtaatgaaaatgaaccagaattagtaggagatgtgagtgagctttttactactgataataacgaagaatttctaccttggattgaaaataaagctagtaagaaaacagaaattaatgatagtgtaattgagcatgatgtagacacagttagcgctcttgtaccttcaacgagtcataatgaaaataaaaattctcaagtaaatattgatatcaagcaggtagataacacatcagatctatttgataaggacatagatcagactgacgaaatttggttgaaagaaacaaataacaatgttccttcttccccactaacttctgttacacatacagtcgaacctacagatgcatcgaccacaaaaataaatctagagccttcgcgatccgttgttaacgattcctttaagaaattttctttcttaaaagacgatgacgatcttttagatgatgatgatgatagtttcttagaatctgaagatgagttggtaacacagaatgtcaatagatctgacagcttcatatcaagtgaaggaattacctttgataatacttctcgaaataattcaaaaaaacaatttcatacaacttctaggtatacacctaccaattctgatatgatggtatcagatcaaaatactctttcaaaccagggtggtacagttggtattgttcttcctcagcaaattaataatatttctagaccagcttctaatatccagccttcccaaggctctactatccaattatcaagtcaaggcttaacgagaccatctttgaactctcaaaatacacaacaggttattgaaaaacttgctgttgaaaagaaaaagtcagatgcttatgactttccaatggatttgattgctgataaagtaaaacctgttcatgctaaacctgtcgggattccaagtcctaaattaaataatacatcgtttctacctatgaaatcatcaagaaatgtatctgtttctattcggtctacatctggttaccagtcgttggatgctgtttctaatatttcaatgcctgtaaacccatatgcatcagttattaaaaaagaagctgctgctaaacaacctgttcctttaacaggacctgttggggtggtccctccatctttgaatcttcctgtctctcccacttctccaattaatagcaataatatgatttctttcatgagttctccgccattgcaaggaaatgcaaggaatttcagtaacaattcatctatatctagtgctcagctaaatgcaaggtcaaatatatatgccccacaaacagaaattaatgctgcccctccaaaaagggcatcacagtcatcacaatatgcacctcggtcatcaaatacattacaatcagctcaagctcttccttctcaatataattttcctccatccaatggtaacccacgtaagtctatgacaatctcgcctgttaacactaagttgaattatacttcatctacatcgaagggaaatcatgcacgtaaaaactccagtttgtattctccaaacagtaatgaaaactcatcaaggtacgcgccaacagttcatcctcaatatcagcaacaattagagactattcaatctaacttcattccacatccatttcctgccacatccattcctcctaaaccaaatacgatgaaacaaacagtttcacaaatcaatcctttaggaattattcaacaatatcctcctcatccaattaatgataatgaaaacatatcgcaaagattagatgcaacttcacaactagattcattttctaatcatcaagtgagtggcacaggtttgtcacagtctgttagtggaggaagctataataataaaaaatcagaatatcattctaacaagatgatattagaaattgataataatgctttgctttctcgtcaattccctcttttccagtttaattcttctagtaagcttgtatatggtattcccgtttccatgggtagttatgctaccactacttcggtggttaattcgttagaagttgtcagtttagattctattattaagtcagatcctatattgaaatcattcccaggacctttaacacagaaatctaagcagaaagacattgagaaatggttgtctacaattattgaagaaacaaatttagatacaaattcagatgaatatttgatttggaaaattcttcaaattaaactctctcttaattgttcaatcaatgatatatcagaggttatttataatacatatgaattacaaacatatttgtctcaaccatttaatctaaacatttcccaaccaaatgcctataagttagataatattggtcaaatgagaattcttgcttcacttcaagttggtgattataataccgccttgcgagatgcgttgggtcataaggaccatacgatggcactattaatcggttctctgatttccaaagataagttggtagatgcagtcgattcatatttcgttgaagagggtaataatcctacatgtattaatttgttgtcacttatattccatgcatttatggggaattctaaagtagtaattaagaagttttattcagacaatgagaaagcgacttggattgtggataattggaggacagttgttgctgcagttttgaaacattgcagtaattatgatagtgataacaaaattcctccggttattatagaattttttgttgaacttgctatctttttgtatcacaaaggacttaaactcgttgcatctcttttgtttatgattgttgatgtaccattaagtatgataccagttctaaaggattcagatgtaacttttgattatattggaaatcctacttctgtacaaagcatagtatggtcagaactttatcaatactattgtgtggtgcaaaattctaaatcgtctgactatgatgaattactgcctcagaaaatatatcatggtatgtatctacaagaacaaggactttcaaatttggctactaaatattctgattatgttgcttctcgattgaagcaattaaacaagaaagatgttacttctcttaatttgtctagcaggttgggagagttgcaaagtcgtttgattggttccaattccggttggttactcaagccgaaattaagcagcgtttggggacaattggataaatctttcaataagtacattggtggtgatgaggatgcatcaccaactcctagtgatacgtttggtaaatacgtagtgggaaatgaagaaatcataaaatcatcacctaataatatcatcaacaactatgttggcggtaacatagagacttctcctgctgttatgggcattggtaagactacaaatagacctgtcatgtattcaccaaagaaatatagttttgttaaaaagcctatagaaaaatcactatatgttcctaagtcacaaacattatccacatctaatatcttggaggagatacaaccttccccagttaaaactaccatgtattcgcttcgtacaaataattctgttccggtgaatatctcaagtcatttcaatcatgtagaaccagcaaaacaaaatgacaaggaaatttcagatgcaatggtttctgaaaaaagaaatgagtccttggaagaacctagtatactaacgttgcaaccaaaagagactgatattgtagagcctgtaataaaagatgtgtctactgaattacagtcaataccattaccagttgataatagtgatgcttctcttttagcacattcaaatattgaagaagtttccactaatcaagacaatattccttctcatcgaattaatgaggtatgtaagcaaggagttaatattgatgattcccagcaactaaagaataatagtgtggaactatccataggagacaataaaatgcctcttccagttctatcagaatccgtttcttctataacagatgataaaatactttcttcaaatgctatacacaacgatttatcccatagtattgaaaatgaaattgcatccgttacagaggaccgtaaagagatgctttcaacatttactacacgtgctgtttcatatgtagcagaaaattcaatttctccctctccaggtgcacagatggccacttcaattccagtgggaaataattttattccacctttttcaccacaaggattaacttctattcctttagttcaaccattaactgtagagacaaagaatgaatctgatagacagaaacctgtttttaattctacaaaatacaatagttttgcagtttctggtatggatgctgataatttggatagttttgagcctagaataagaccatcgtcatctgcggcacaaggtgtcccatcagtaaaaatctcagaggaagctaatgttcagtataatgatgaggttgaggatgattcagatgaagatgaggataaagagactattgctactaagaaagatactgaaactaagaagaaagtagaaaagaacaattctggttctcaaaaagcaggatggttcagttggttaaagaaagatcctaatgagaaaaaggttgtaaaagccaagttgggttatcaaaacaacttctattatgatgaaaagttgaaacgttgggtcaataagaatgccacagaagaagagaagaagaaaatgcaggaagcggcagcacctccacctccaccgattgtgaaacgtaaagatacagtggtaaaaactactcctcgtcctagcttcagtcatccaaacactaattctttatcatctgcaccctctggtccacctccaggtatggttttaccagttaatccactttctggtaaacccatgaatcaagcatctaacaatatttctgcatctacgtctacggaaagctctgcaacgcctaaacttcctccatctataagtagtagccagcctgttaacttagctggtaaggcatcaaatggcttagatgacattttgaatatatcagcagctacaacagcaagtagaagaaaaaagaaacctggtagaggttatgtaaatgtaatggagaacagatagattatatagaagttattagtagttttgaataaactgtatcagctactgtaaaaaatctatatcataagttttatacagaatttataaaatacattaataaacggctttttttgagtaagtcttttttatatattccagaaggtatatgtatataaaggtagttaaaaaggaaaaaagaaaagtaaaggcggctatgaatgtgtttgatggtacaataaactacagtaaacgtactagaataacccaattgagtttcttgtgtagtgataataaataatgaagactatagttgatgtggaattgaggaaatcagcgatggagttgatagtacaacacattattgaagagaggtccaaaaataagaatggcaagtatgacaaggatttgaaagaaggtgttcaaagatatttaacaatatttcaagaggtgattcaaaaaaggttaagagtgtggtctaaccagaatactaagtttgacttagtgaatcaagctaatatattaatggaagaagagagaactttggagattagtgatccaccaacaaaaacccaacttctgataatcaaaagttttttaaaggtggtttatcatcaattttatacaaatagtaaggatttttgttttaatgagggaaatcatagtttacttttttcaatttttattaaaaagattacactggaagcaccaattgatggattgcaaaatcagaatacttcagttgaatctagtttatctttagagtctactataatctctctattgaaaggtacatactataaactaggaggattcgttcattctactgatgtagattttagatattgtttttatatcctccctgaaactaactcttttttaacatccaacaattttttaactgatgaatttaccaaaattgaaattgatgacaaaaatataaacaagaattttatagccaatgttaataacatggaagattcgacttttttgataggggctaatgacattgctcaacaattttcttccaatactttaaaacatattacaataactaaacttccctgccaaaaatttgaaggactatgggaaaatctattttttgaaaaggacatcaagagaaaattatttaattatggagagttttcaatggaaattgctaatcatttaaaaaccagtaactacaaaagagaatttgctaaaattttagtgaataataaaattattttacttcatggacctcctggtacaggaaaaacaacactctgtcaaggtctttctcaaaaattgataattagaaagaagcacactactgttgtggactctatgaaatcggaatgtaaaggattactaattgaaatatcctgttcacaaatgttctctagatggtttggagagtcctcaaaaaacttagaatgtatttttaacgacttgagaaaaattctttcctctccagagtataaaaattgttttttatttcttttaatagatgaagtagaaacaattgctggttcaagaaaagatattttatctaaaaatgagtccagtgacagtgttcgtgtggtaaacaccttattaactcaaatagattcgctaaagtcatatgaaaattttctaattctaacaacatctaatctagtaggatgtttagatgctgcatttcttgatagagtagatgagaatttttttgttgaaaatccctctgtgaagtctgtttccaatatgctactttcaatagtcaactcacttttcgatactgaaataattaattcaaagaaacctactaaaagatgtacagaagaaaaatatcttaaaataatagatatcttagcacaagaatgtgttgtatgtatacatacttcaaactgaaaccgacattgttcgaaaataaaataaaatcatttttctactaacaagttttttacacagaaaataaaattaagtggtagaactatccgaaaactgcctttactttgtttatcagagttttttagtgaattcccagtacctttcaacgattttttagtagcgttagcctctacaataaaacagcacgtagattcgcaacaagataatcagtgatacaataatagtaaagaaaaaaataaaccacatcaagactagagtatttactaacatactttaaaacaattagtgttacattgctgtatctataataattacagaaaaagtttgatatataacatttgaaagtataaattcaacgtaatttcttaataaatgtatcaagattatattcttcttcatactgagacgagtcccatagttcttgcaattcgccaagcgcttccttagccttacctgttaaaccagtctcattggcgatgtcttccatcttcttattattttcaattttagaactgtctgcttcttgagaaggaacgttagtagtatcgaacaagtctaacaattgtcctgtgtccatcgatgctagaccactattttgttgattaacaactgtggaagcaatattcatcttaaatttttgcaaacccataatcttttcttccaaagtacctttagtaattattcgatagacattgacaacccttttttgacctattctatgcgcacgatccattgcttgcagatcgttcattggattccaatcatgctctacaaaaataaccgtatcagcacctgtcaaattcaaccctaaaccaccaacttttgttgttaataacaaacaatcaatggatgggtcctcattgaattttttaacaactttttgtctttcacgaggatccacactaccgtctaatctcatatatgtaacagatggcatatatttcttgaaaagatcattttctaccatatccaacatatctttcaactgacagaaaattagggctctgtgttgggaaatgacattttgactggtcatataagtactcgactttttatcattactatcttcaccgataccacattcaaaaagtaacgtacgtaaggcttctaactttggagcgttagcaatatcatgtaaatccatatttgtttgattcaagtattcctgaacttgtttcatttgtgggtgatttggagacaacaccaaagaaggatggttacataattttctcatatactgtaaggcttggaaaatatgttgtttattttcaatatcaactgtattctcaatgtccttttgtacaaatgccttttgcttcttagcaaaatcttcatacagttgcttttgtaagtcactcaactcacaatagtaatcctgaataatctttggaggtaaatctgacaaaacatcctcttttaatcttcttaacataaatggtagaacttgtcgatgaagggcttctaacgctaaaacaccagcttcctgctcctttgaagaattcttactgtttctagatgcagcgatcggtttagcaaaacgttcctgaaaactttttcagtccccaaaaagccaggcatcaagaaatcaaacaatgaccacaactctacgacattattctgaattggagtaccagttaggatcaaacgatgatttgcattaatttgttttacagccttagataattttgattgagagtttttgattatatggccttcatctaagacacagtaattgtagtcatatttagtaataatatcaatatcatttcttgcaacatcatatgaggtaacaacaatatcagcagaacctaaagagcttcgtaatgtatgacgtgtagagggacctcctgcataaacaataattttcaaaaaagatgcatattgttggaattcattttcccaatgaccagtaagtgatggtggacaaacaataagagagggcaaaggtctactttcaaccgatgaggtctttttgtaatcttcttgtctcatgtattgatcactggcaataatacaaatagtttgtagcgttttacccaaacccatatcatcacataatatcccatgtagatgatacttattcaaaaatgctaaccaattaacaccttcctgttgatattttctaagagttgccttaattgccactggaactttaaaaggttgggcttttgatggatccatcatttgttgaataaaatcacgctctctctcacgtcctgccattaaatcttctggaagaccctctggatctgagataccttcttcaagaggaacaagtttgataatagtggcaaaagtagtagtagccaacgatctaactgcttcattattatcactcattctcccaagtaatggaacgattagaaaaataacatatggcaagatatcagtatccatagatagagatagatgataaattaactctgtactgccctgacgatcaattacagagcctgcattattcatcaaaggaaggatttctttaataataaatggaagaacgatcactgatgagtgctttgcaataacagcaaaagtacgagcagcagaataacgtaaaactgaaattttagaacgtaaaaattttaataatagtgggaatcttggtatgatctcactttcatttatactattatctaagtccggataaattgctctcaaaatacccaaagcatcaaccaaatactgtcctagtacttcattgtatgaattttgagttgataattcatctaatttttcaaggggatcaaacattaactcttttaactttggaacgacggtaaagacattagcaccaaaaaagtttagtaatctgttaagagtatataaaccaccttttctttttatctgagcaacctctgccatctttaacaggttcacatcatcgtgaatagcaagagatgtatcttcttttaataatgttaaaatctcatcctcatcactggcatttgaacggaattctggaacttctgaagtatcaacacataagaaaccacacagatttttgacaattttattggatacattaacttttccatttttgaccaactctgaaattaagtaaacaacagtatcacctgaaatattttgtagcatttcattttgttcttctttaatactatccattaacgatctgataatagggtttaacttgggtaaaatgccatcaaataacaaaattgcagaggcgtaattagctagcatacttatagatctttttttactagcttcctctgttgcctggatggccatatatacacgatgtcttgcatcctccaaaggtttttttgcaagaagtttataagaattacccagggagttaaacaacttttcataatattcgttataaactttctttgctgtatcaataccgaaagcttgaggacctgcatcaggttcaccttgaacaactattgcgatactaggtaacttatgctgtggtaacataccaacatcaacgaatgctgcaagtaaactttgacattgtgttctcaaagctttcaaattgtgaatcaattctcggaagacaggtaattgagcaggtgactgtaattgagtattcatagtattgctgaatattgctgaaacaaaactcggaactgtttggctttgatgatgatccttccatgctatacaaaattctgaaatcacaatagcaaccaaatttcttggagtagcatatggaagttctaaacatttaactaatatattagaaaaaaagattgtaaagttgtctcttgaaacatcgctaaagtgcgtcctagagcttttgcacctaaaacccttgtattaattattacagttggccccagtaaagtaacatcacctgcgatcataggtgcatcaatattgattttttcagtgtttgttggaggtggtattgcggattccgcagtggcttcattaatagatctctttctttcggggcgtaattggtaatgttgagaaggctttaaaatatactgtccttccatactataatttttgccattctctccaataggggtatttaacaaatgtaaaataggttgcagatgtttgcctaaaatatgatcaatagacttttctgtatgcttttgattataatggtccaacaaagatatataggtgttaaatgaaagatttaaaatatctgtattctgttccaatagaatattttgaaatattaatctaaagactttaccatttaaccaatttttggtagaatcatcttttattgaaagaaatgcattaagtaaattaagaactgattttctaaccgaagaaatggagtgacgaagaaaagggtataactttggaaccaatgacttaaatgaccattcagacggatattttgaagctttgtattttaaaatatctaatacttttggatactggcacaatttagcaaacaagtccattactgaaccaacactcgatgacaaatcatcttctaaatgagttaaagatgaccaaatagtggccaacactaaatcaatacgttcagtatctatatttaaaaattcttcagtgattggagaaagagtagaggccgcaacactttgaacatcgtcatctgattgattaagcccatataatactatgttaactacatcattcaataaattatttttcattagaaaagatgactttatactcacaaaatatcgtacacctaataaaccaccatgtgttgcttcccatattttattgggtaaccctgtaacacttggatcttgcaatatcaattgttctaagatacgaaatatttgtaatgccaaactatctttgacatgaagtaataaggcagctaatgtttgcgccgctgattctctcacgggtgcaactaccgtatcgtaaacgtaatcaccaaatctgtctaaagcaaatattgttagtagtctaacggctaaatcttctaaaaactgcctatttctaatgttgttttcttctctacttttggtttttattctacctacacaagcggcatgtttttttattaactctcgcagtcctaaagcagcaccatgtctaatttcccatgaatcggctaaaaggtttgctaataataattcatatataccttgcaactcccatacaagtccttccaccttttcatgtttttctaaaataggagcagtgacagtttccaacataagtttatttggacttgcctgttcagtgaattctaatttaggattagtgaatgttgttggtgacagtgttgaatcagaattttcactattataatcttgttgttttttcaagagggactttgatactgaactttcggtaatatcaattggttttgtagaagtcgacttaccttgctgttttttctttctctttgccatggccaacattctagctgacttcttagatttcgtttcattttcaattttcatgtctgcagatggttcaacttttatttgttttgttttatcattaagatcaaaattggaacttcgtataccgtcctttgtagtagactcatcattatatttattaatatctacggctaacaacacttttttcgacttgaataaagcatttaaatcccaacttgataaactaaataatgaaagattattatcttcaaggaaaaagtcattatcatattgcttgaactcttccattttcaccttattatcattttctaacttaacttttgcagtttcttgttcttcctgttcggatgtcatactttcttcattttttacatcttcttttgtatcgtttggatcccaaagtgacaaatattgaacaatatttccaactgctcttgcggcagtgactcttgtttcccattttttagataataaaaaggggtatactctagataataatgccaagatatcttctggatgttgtttggccaaatcacccatttgatctgctgccatatttctgactactttagtagaaccagtttctaataatagaacctgcctatctaatctagatatcttagaagtcatttttattttttattgtattttttaacttacgaaaaaaagagggggagggacgaaaaggaaaagaggaatgtaaggatacctggatagattggaacaaatgcaaaataaaataaatactaaaatctaaatgtttaactttttccgtttaaagggaatatgcaatttgaatatgaatagtctatgtctatcaatgacttaaataaaatgaaaatgacaatataataagtaaacccagtacttgtctatctatgttgctctttagttgtgtaaggaactaatgaagcaagttaaaactaaacagaaaacaagtgcctttgtccaaatgcagaatagccgccgattagaaaaatagattttaagcgatgaaaaatggaaaaaaagtttacgaggaagctttcgcaaactgcgcaaaactcccaaatccttcgcaggctcaaattttattttttttttttcaaatcctttttatataaaatttctattttttctcaagtcacaaataattcgaacaatagagaaattacgcgattttttaacacgcattttgtttggaaagaaaaacaaaaaaacaaaaaaacaaaaaaaataaaggattgaaaatttgtcttttcgtgtttcttcttcatttttaggcttttttttgtctgttttctttacaatgttgattttgaggaacacagtctgaagaggaggaatcacttcttacgtgtgctcattgaaaattctagtttgaaataacaggcaaagttagctaaaattaaactacttctttttatatacacctgggctgtcaaatgcatattatataatctacatgatcaaaaacacaacgagaccaaacgatagttacgaaacttgtgatcgtcttttattgttatcttatcccacttgcgtccatataatgtgtaaagctactatataaggttatataattaaaatcctgtatacaagttacttcacgtatctttacaaaaggttattatcattttagaaaaaaaacactccttcttgttaataaatatgactttcttttatctgtgagggtaacgctgatatgatactttgtgtcatacaagttattacaaattcattagtggctcaatagcctcataattatcaacaaattatttttatgcagttatcaaaggaaaataatcagtattgcttttttcggaaattgcacttctttttttttgcaaaattcaaaaaaaaaattgttctttttctattcttgtctttttactaaatttcctttttccatataaaagctctaaaaaacttcgcttttccaaaaattttgtttttaagttccttcttcaaacagcaggccataagctcttctaggctttttgaggtacagcataaatactcaagcgtaattatatttctaaacaacacatcgtccattcgcaatgccaagtatgttttaacataaccgactaacagctctctctttttttttctcactaagtcgaatagtttattatttattccatcgttttatatatagatggtgcaagtgacaagtgattaatcgtatcgattaatcacttgttacttgtagaggattcgggccctcgtagtcgaaaacaagataagaaagaaagaaaacagatacaacagtatagtagtggctataccgtcttccattttcacttaatatataaacacactctagtatagatagaatagttgatagattcctgaatcccgacacttcaggcaatcattttctactatttattactcctccaaacggagtaatggtctgtgcttgatgtaaatgacacaatgtgtgcaaatgattatgtgcttggtatagtatttaaacacgaagctatcatgactatttgttttcttctattttgactttctggttcttgtgcacatgcatgtttgccgacaaatggcttcaaatatcctcgtaaatagtaatcgtatttttctttagttatatatagtggtgccagatggtctccccattgtagtcatcctagtgaattttatttttactaacattttctaataatcgttttcgacgactaactttattaataggagccccaaatacttattccaaaacttactctaccccaaaaagaccatacgaatcatcgcgtctggatgctgaattgaaattagctggtgaatatggtttaaagaacaagagagaaatatataggatttcctttcagttgtcaaaaatccgtcgtgctgccagagatcttttgactagggatgcaaaagatccaaaaagattattcgaaggtaatgctttaattaggagactagttagagtaggtgttttatctgaagataagaagaaattggattatgttttagctttgaaggtcgaagatttcttggaaagaagattacaaacacaggtctacaagttaggtttagctaaatctattcaccatgctagagtcttgataacacaaagacacattgcggttggtaaacaaatcgttaacattccatcctttatagttagattggattctgaaaagcacattgattttgcttctacctctccatttggcggtgctagaccaggtagagtagctagaaagaatgcaagcaggaactctaaaggtagtgaggaagaagaggaatgaataattgactgaccgaacttaaatagacatatatgtaccatatagataaataaaaacgcaattttgcatcttacataaccataatgatattctgtttttgcaatttaaaaatataaccctctttttttttttttatctattaataccaatgcacaaattgttcagacaactatattatttatcaactattttacaacttaagcgattttaaaaaagaagttgtatgactatcataacacccataccacagaaaaaggtttttgtcattttttaattatttccatattaggaaatatatatctttcatattttttttacataaaattatttttcaggcttaccaaataattaatatagatttccgttctatctcaaggtaactcagaaaataaactttaccaggggaaaaacacataggtccaactctttaatgtccagtaggaacacgatacgacttatgagcatgttgtacactctccataatgttcttaaccaaggtttggggtgtaatgaatgaacggtccactgcctctcatggtgacgagcgcattacactacacatttggcaccaattccttccagacactaagggatcccccagcatcaccttattcttgcgcatcctaagtttgtatgggaggaccaaaagtgaaagtgtattgtagtatcaacaaaagaataaagaaggtacgtgctctattttatatagaaatagtggggttaggagagtcgattactgttagccaaaaaaaggcgaccaacacaagaactataagcaaaaatgggtaaatcgtatgtaaatccaatgtgaatttacaggaatttgatcaatagttgaagtggttaaaaattggagatcttatcataggagaaaataataaaagatgaatgttttagatttgcataacatagaagagtaacataagacctatatattttgaaaggcaatataattttattaccgggtacaaagatcatagaaacataagtccgtaattatttataagagagaagaattcattatgtaatgccggaataatgccacactagccgtatacaaattactgtatcttatatgctgttaattgaagaatattcgttactaacttctatttttaaaatgaattcgatgcattatatttacatttgaatttgtgtcctgtaatatacttattattgcaattgtttttttatagtcacggtttaagatctcgtactcgttacatgttccaacgtgacttcagaaagcatggtactataccattgtctacttacttgaaggtctacaaggttggtgacattgtcgatatcaaggctaatggttctatccaaaagggtatgccacacaagttttaccaaggtaaaactggtgttgtctacaacgttaccaagtcctctgttggtgttatcatcaacaagatggtcggtaacagatacattgaaaagagattaaacattagagtcgaacacgttaagcactctaagtgtagaactgaattcttggaaagagttagagctaatgctgccaagagagctgaagccaaggcccaaggtgttccagtccaattaaagagacaaccagctcaaccaagagaagctcacgttgtttctactgaaggtaacgttccacaaactttagccccagttccatacgaaactttcatttaatttatttggtatatgtataatatttttaaattaaaattatatatatataacatacctcatataattaacatgtacaatctctaaaaattaataaaggaatattgcgcacacgtatatgaatatttttgggatttttgatgcattctttgaaaaagttgtatggttagtgcaacctctctatgatctatatactgttcctatacgaaggaatctaaaaaggattgtcttaacatagagttgcaaacaatagtcactttttaaagtacacatatttattaaaaagaaaagaatatctaagacatattaatatatataagtagacagataagtataaaagagaaagaaacaaaaagtattacaataatgaaaacatgtattaaacacatgatgcctttcaattatctgaaaaacaaaaataaagaagtgaaaagacttaaaaatatgagaaataaacacacaaaaaaagaatattgatcatcaccaccaaagacttactttcaattttctattttaaattggataaaatcttttcagcatcagtaacagcttgttgtaaaaccttatcttgaaaccttggatcttttagttccttttcgacattcttaataatagattcaacaatttgcttttgttctagcttacgcaaagaatcttcatatctgacccatgaatctaaaacagacctagcttggtgagctaaatcagccttttgtttcaattcaaatgctcttgcttccaattcaacagtttctttagagacatcaaaaagaactttagttgtttcagaaacgttttgtaaagtagagacagagttaattctatccttgacagcatcaatatgcttttgcctggatgcatttaacacatcagaaactttcttaactctggactcggcaaaactattgtatgcaggtgccacatatttagctaataaagcaccagctgccaagaaagatgccaataaaatactttctggatttataacgtataattcgttagaaatagcgtaaactaaagcagcagcagaagtacccaacacaccagtcttagctaaggcactattacctggaagagcatcaataatagattgggctttagactttggatctaatattggctcattggatggcttgcgcgtaacttgggatgatgacaagtaacggtatccattatatagactggaacgagtcacagttgctcttaataaggtccttttactgaccttcagcgaagctgatcttaaactcatcctaatacactttggaaaacaaaaaaaatatataaaaaagaaatattcagttctctgattagtaatatcttacctttaacttattttgaaagtaaataattaaatcaaattacagcaaacgtagaatactgaataggaattttaacaatactcaaagcagtcactatgttcaacttgaaatataagttaagtctaacactatgttaatatatgtattgtaccgacacgtccagataacttcatgtaagtaacgacatgatacgaactgatacaactgcaccaaatgtgtgtatttacagtattaaacatttaaaagggcctttttgtttaaagttcttttcactagggaaaaaattcaatataaaaaattgagaaaaatccttaaaaagaaacaaaaaaacactgtaaaatttaaaaatgatctatcattggttaaaattacagcgaacacataatatagaatgaatgctgtataaaaaggccaatatgatgtgtatgcccacatatgtgtatatgagtgtgtgaatttctataaatctatatacgtgcgtgtatgaatatgctttaacagcttatatcatgtttttaggagtattttaagcaaaaagtgcaatatgaatatgaaagaatagaaaagtacaatacaatattttttatttccttgattatattttatagttctttaattgtatcaactaaaagattaacatattttttagtttcaggattattcatcagactcggtgcagtcattccccagactgtggctgcgtattggtttctagatgatccaccaattgaggtagccttcgacaatcctgtgccacctctattatcacctgaattggatgcactatgtgttgcaattatatatttcttattttcgttctcactcataggtttatcacttgtaacattgttgttcaagttacccaaagcgaaattattgttattgctggcttgaagagcccgtctccgctgttcttcggccctagcttccctttctcttaacaattgaatgatcttaacatgagagtggcgcaaatctcttaatttttcttctattccttctggaaatgaatcatatatatccatattagtagcattattcttaactttatataattcttccatttcagctaacaacttatcctgattattaactggaggctttgctactaatcggcaaacattctggccaaatttataagagtaatcatttttatgtgatgtaaccttaattaatgaattattatctgtggaataaccaacactagaattgaatctatgaaatctaaatgggcttatatcgtttccattataataatcatcactgggtttgcccatgaaattcttagacttaccagtttctacattagtatttgtcagagggaatcgattagacatgcgattatatcttctgatatatctatgtgaatcatttaaattactagaggttgtacattccttatcagtttcaatttcaataaaaaaatcgctatttggtaaagttctaggtaagattttatacagagttccattatttgtgtcattgttataatatccatcataatcatcatcctcataatcatcctcataatccactgtatgctgtttatcctcttcttctctgtcttcagcagttctatatatattagcatgatcacttctattagaattatgtggcataaacctgttattaaatggatttatcccctggttgctgtttgtacttatggatatactattacgggcatgtgcttttttatctctcatctcattaaagttactgtgaataatattcaaacctactagtaaattattattcatctcttccccattcaaatcttctaattcatattcatgctcaaagtcctccttatcctcatgatacccatcatgtttatgacttgactctctaacaatcactgatgcccgtcgttctaatttttctagttcaagtgacataatcaaaaatatatctaagtttactatctataacttatgaacattaacaaaatatacatgcacccacatatgcatgaaacggaccaacctaaaacaaaaacggaaaaaaatacatagaataccgactatttaactcaacctattcacaagcataggtaaaatacacatatatattttcttaaaggtgtaacttgtgatgttcttacctcctctttttttatcactaagagtatcacatttgcttttttttttgtttctatttttttcttttttttaaaaaaaagcttttaaaacaatgtttatatacttcaatttttttttcttaaactatatataatagtaggaagggaacattataaaacatagggaaaatgatttggttttgagtacataagatccacattcatcataaacaaagaaggataaaaagatacgataggatatcgtctatatttaacgtttttgtaggccttctttattaaaaaaagttgtatacatataggcatgtatttgaatatatgatcactttgctactacctcaattaatcatgaacaatgagaactttgtatcaaaagaaataaggcctaaacagtggaaaaggttactttggttaagacaagatgactatccagataattatacagatccagagtttatatcatatttagaaaatttaaaagacattcaacttgattataattacgaccagatacgtaaggattttctgaagttttattttataatcttaaatacatgttttttattcataacatttcattcaatatatgaatacagctatgatcctaaaatgttcacatttttaacttcatgcattattgcaataataagtgtaatgaagtacaaatatttaacaaataagcagattaaatctagcattataataatttttacaatattgacattatcgcctgtactgaaatcattatcaaaaacaacatcaacagattccatatgggttatatctttttggttgacaatatattatcttttttcggtatttaaatcaatgacaagcaaagacaatatcaataatcatgataacaacaaagacattactctcaatggtaatgataatagtgacaagagaataacaagtaagaaacaaattaatagagtagaggatataacatatagtaaaaatctaccgacaaatattctattagctaatgttgcaatgctatcctctaggttacccacaacaacacacgtattctgttatctactgctttgcatcgagattaatatacttctacctaaacttataaatctctcaaatttgcctgtgtcattgctatcaaatattatagtttattcatatatcaatatatcattaggttttagtagcatgataatatttggcatattttcagttttattcactgctatcttaccaagaatcttttggtactgggagacttattataaatgtaagacaccagagatattatccttatgggacacgaagacaccaatcctatcataataaataaagtatatgttttttattcaaaatagaatcttttatctataatcatttctataaaagatcaacatacaacattattgaatcctaataatgcaatcctaaactttttgtatattacgaagtacttgcatgtctcacataaaaacccataacccatcagcatcgtgttttttgttttgtttttgtatatttttaatttccccttttttagttccccatttttttcttggtcttggtctatatcgcaacaacaaagtaaaattcaaaaaaaaaaaaaaggaaagaaaatagaagaagtcgtgaaagcttagtgcttctttcttcttcttctctcgttctcttgtctaatttccttttattatagttactcatctgaacaatcattgaccaatacagataaccttgaacaggaagctctctataactttccaacagagatcagaatcatccaattgtactattaggaagtgtttcttttaaagaactaacaaaacctgcccaagaacaacttaatatatcttggttgttatccaatagtgtgtgtcaaggtgaactgttttagttaagaatttaaacaaataaaataaaaaagaaaagaaaagcaagtgatagaattacaggaatctgtaaaaataaaaatagagtgacaataagggaatagacaaaggtacggactgatcgtatcaaaagtggtcgagtgagaaagagaatccaaaaatatcgagataaaaacaggcataatagtaaaaataatgttcttattatggtatgttgaaatttgtaatcatctttttaatgaaagttgttgttactagcattagcataattggcaagaatgttatctgttgtttttaatctattagatctagcctaattttgcaaaatgactaaatacttacaatagcttaatgcaaactagtttttgttctattttcttatactttgtactgcatatttttgatgttattgtaaatcttactggaaaagtcaaaattcttagtactaggattaattaaacaactaaacccttaaaaaaagtttgaagtaatcaaagttggaaatatagtacattattcccttaacaattattaaaaagtgacagaaattcgattcgatagacgaagtatagctgaaacataatactacaagaatatcaaaaagattaacacaatatattgtattaggatttgaaattgttttttttatcttttttttttcaattaacgtgtggacatagtttacaatctaggatgggaatgatttcatgttaaaaaaagaaatgaattaacgactaaagcttaccaaaaatattacttaggtttattaaacatttcattaatagataatcatatacgataaggaaactttttttgtattaatttttttttatttttttatcatagggtatgaatttcttttctaattttagaaatatggaactaactagtattaataataaaactcctggtaacaatatttatgataaaaatcctgtacatataaataaaaatattagtaatcatcacaaaactataattcatgatagtaacgacgacgacaacaacaacaataaatatccaaatactaacaaattgcagtcatttttatcagaacaagaacatatttcttcacgaataactaataatgccaataatcatgatcaagctctagcaacagtatcaaatttttacacaattacccaatatattttgcagtcatattacaaagtcaattttaacgatcttctgagtttaaaagtgactgatttaatagtagatcaaacatatcctgattctttaactttaaggaaacttaatgattcagatactttacaaacttatcaatattttaacacaatatcaagggatcctgatatttctaaatgtccgatatttgcattatctgtttattttgttataagatggtcatcttcaaataatgtaatcacattaaacaattataaagaaattaagctattagacccaaattatattacatatgatccaaatccaatgctttttatacaaaatcatctcaatggtaatgtcaactcaacatcaaagataccaagatcaactttatttgaagtttccaatcgtttaattaatttagtatttccatggttagatagtttcaaaaggcaagttttagctgtagatagaaccaattatatcttacattccctatgcgaattatttgaattcatgggcaaaataataattcaagatttaagatatttaaatcaacatgccttattactacccaatatcgtgtcttttatgggtaaattcatacctgaattactaaacgatgatgaatttaaggggtttgaaaatacaaacaatggcaatatacttatttctaataataataataacaataacaataacattaataatttgataaacaatgaaaacaacacaataccattcaatcataataacattaataataatggcaacatttcggctactgagaattcaaataataatattcatataaactcttctataccgagagatttgaataatgatatggttagtatacaaacgttgaataattctacacaaaaattatcccaatatgtggatacaaaatttatagaattatcaaaaaaattgactatagaaaatataagattaagccaacaagtagcacaattaaagtctgatttaggtactttgtcttcaatgtgttcccagatgatccagttacaaagacaaatgttatctggtcaaaacgcagttttgaacactaatctacgtaataatgccaaagaaaataatttagcaaagaaaaataatattgaaggagtaaataatggaattttgattatagataagaactctttaaatgattcatcctttagaaatataattgaatcattacgtggaaacatcaatcaaaataaaagtccgacgaataatagggaagataattcaattaataatgtccaaactcaggattcgatggattcatctatactggcaccgatgaaagtaataccgaatctagataacagtaatattcaaataacagcagcacaagtcattcaaacagcaccatcaccgaagggaccaatatcaacagtatcacctaaaataatagggaattccttatctagaaattcgtccttgagtcaagaaattagtcaattatactccggttcaaaagaaaaaagaaaattaccactaccacaaacttattatgaatcatttggatccgttggcactccattttctgggcattctcctacctctgtttctggtatagattcacctttcacaaagagaacacggttagatgataggccaactccttcacaaacagcattaaactctttactgtacaaatctatcgatagtcctaaagaacagacatctggaaagagtacatctaccataatagaaacacctatcacattagaaactaataaagatttgactcaaaaatacaccactaattttatcaataatttatctggggttaattccgaaagtccatcaacccaactaaataatgctggaacaactgtagaaatgagagatgatcttatatcaaaaattcaagaggaaaatagcacaattacaaacaatactccacaagaaatcaatacagatccatccatatcttcgttcgaaaaagtatctccaccaaatgctattcctgcaggtcttcaaaatcaagataatgataatagtgctaatagtagtggaaattctaataaaaatatacaaggatatattgaaaatactatttctagttcgggctctttatctaaaagcttggaaaagaatgatccggaaagactagggaatacaaaagaaaataatacatccattaatctacagggcataattaataaaacagagaaccctaataacagtcaaaaaaatagaatcagaataataaaagaatttacagttgtgggctctaatcaggaaacctcatcaactgtatctaacgttaataatatgccgtctcaaaaagatgaatcattaaaattcaaacgtattagtaacgaacttataaaggaacatattatacaagtatcttcagagtctctgtcaaagaaagtgaaggataaaatcttttcaaaaaaggaaaaaataaaagaaaaaacattcaataaaaataatcaaaaatctagttccaaaacaaagaaaaaatcaccaaattcatcaaaaggtggtccaaatcaaaatataaaatataaactttctagagagaataaaacaatctgggatttatatgcagaatggtatattggtattaatggtaaacctccaataaaaaaattaatcgaggaatatggttggagacgttggaaggtgactgaagattcccatttcttccccactagaaaaattattatgcaatatattgaaacagagtgtgatagaggggtgagtttgggcagattttctaaagatcagcccagagaagaagtaagaaaaatcatagttggtgaccttgaaaagtttagaataaataatggcttaactttaaattcactttccttatattttaaaaatttaacaaagaaaaataaagaactttgtatttttaaagattttaatacatggcaaaccaagaaaatgactgagtttgaaaagaacaaatatagtaaaaggaagcatacaaatactgcagattcaacaaggcatgggaacaagaataggaaaaatggtacaacatcttttgtaaataccgccactataccggtattgccatttaggagtaaactttacaatattcaacccattatgactcctgcttctcacaatgcatcttccacaaataactctactacaacagaaaaggataacacataataatatgctcaaactagtatatatcatatttttgtgtttcttcctatttttgtatttccctccatataaaattgtaaaagttttaagtaaaatgtaatacttttaactatatataatgcattttaatatataaagaagtagatagacttataaagttattattactaatggaacagggcagaggggttaaaatgactcctgtatttattttgtattaaataaattataaataaattttttgcatttattctttttttggacaatatcctttatgcacggattaaattaagatattcaaaattgaagagtcatgtcagaccagtactttaaaaagaaaaggagggatatgataataaaagttatgtgtaatatattgtaggtgacatacaaaaaatataaaagtaaagattggttgctttaaaaattccataaaatatttttaaacatacagcattgaaaatttattacattacacaagaagaattcatatagaatacttttttatttttcttccaagttattgatgatctagatggctcatgaaaagtttgttataccaaaacatctctcgatttttcaagccttacaattattatactcaattgtggctacacaatgtgggaatatatttgaagattttgataaaataagtcaatcgagcgaacataaaattctagaaaggatatataagcaacttgaagttcaattaaattacttggattctggttttcgtacaattgaaaaaaaattcggcattactgatggatggaaccagtgggttttagagaatgtacaatgtaaagaactattcgaggaatttcgaatactagaaaatgatattagaattagaaggaggaaaattgttgatatactgactcaatatgataaaacacatgataataaaaagcttatattttggaaaactaagaataagatacatattaaagatattgataagagagaagatcaaattattatgaagcaagtagaacatataaaagaaatgagaagacaagaacagttaaagaaaaagaatgaagaagaaaggttacgaaaacaaaaggaattagaacgtaaaaagatagaggataaacgggaaaaaatcctagaatcaagaattaaagaacaggtcgaacaaaagatgaataggaaattaaaagaacaaaaaattaggcaaaaacgtcttgaattagaaaatgagaagagaataaatgagttgagaaatgaaataactaaaagtaaacaagaaaatggtaaaactgatgcaaaaatagtatctggatcatcatctcatcttaataataattcaacgaggcgaagtttagacataaagaatagatcccatgtgaccgaacctcaaaataacggtaatagttatatctctattagaaaatcattagaatctccttctggggggaatagttcagatagacgctcgttagatatgaaccgtgcagcggttattgcttggactgcatctcaaaaatctaatcactcagattattcaaatcaaactcacaactatatatataggactcttcaaagaaatcaaagcgatgagaaagatatgataccgaaaaaggctgataataaaaaatccattatattgagttatggttctccagtggtgaaatcaattagttcatttaatagtttacctacaaatatgaaaaaaaaacaagaaaagtcaataattctaagcctactgatccatcgcattctatttcgccaaaatatatatctaaacgcacaatgaatgactcaattaactcatctgaattagagagttcttttgagtcgcgattacaacatattatggagactcttcatggtgcagacgttgatgcatgccaacaaattgtcaatgacattatggtttctaattcctctatttgctgggatgatgttgttggtttagagaaggctaagaattctttgaaagaagcagttgtatatccatttttaaggcctgatttatttaaaggtttaagggaacctatcagagggatgctgttatttggaccacctggtacagggaagactatgatagccaaagcggttgctacagaatctaaatctacctttttcagtataagtgcatcttctttattatcaaaatatttgggtgaatctgaaaagttagtaagagccttattttatttagctaaaaggttggcaccttctattatatttattgatgagatcgattctttattgggagatagatcagaaaattcgagtgaatcatctcgaagaattaaaacagaattattgatacaatggtccgagttatccagctccacagcacgggataataatgataataagaaccaagaacttgataacaaaaaaatagtaataataaatgtaatacatttcatgaggacatttgtctggataatagggtgttggtccttgcagcaaccaatttaccttggataattgatgaggcagcgagacgtagattctcaagaagactatatatacctttaccagattatgaaacaagattgaaccatttaaagaaactgatgaactatcaaaagaatagcttatctatggaagattttgaagttatagctacaatgacagatggttattctagttcagatattactagtttggctaaagaagctgccatggagcctattagagatcttggagatgatttaatgaaaattaacttcgagaacgttcgtcctgtttccctacaagattttcgccaagctatgcatacagcaaggaagagtatttcaaaggagtctttgaaacaatatgaagaatgggccactctttacggcagtgatggatcataagagagccttaaaagtattatgcatatagagtaacgatatggtgacaacttattgcattatagattttttttcaaacattatatagtcagtggatgtatgggtctgagtggtagttaataattaggctgtttattgaaggttatagttaatcttttcagattgagtataagtgaatggtagatcggttgattcttgtttcaaaagatcttcatggtatatatacttacagtatatatatatatatatagaaatatatagtggaacctagtttacttaatatgttagtagttaactagaaaaaaacttcgaaaagaaaatatgtccttaattaactatgttttgaacttattcggtctgaaaaaattaacatacaaacaacttacctatggtgtgctctctgcaacatctatctatatattatacccaagttttaagggcatattatttgctattttaggtattaaactaattaaagtagatatagatagtgaaagatgggataaatatactacaggaatttcaaatagaggcaacgattgctatatcaattcttctttacaagcctttagtgcgcttgaatatttaactatttatttaaatgaatatattcagttattttttaaacaagttgaaattgcagaagaagcagaaaaccactcaaagacaaatattaggggtttattacatgaaagcttatgtagcgtatgtggtgatctgcaaaaacttatttgtcagcctaaagtaatatctaatgttcagatagttcaatctttagaaagaatttttcaaagtaaaatatccagagatcaaaatgatgcacatgaattcgtgcaaatgttattacaaagattatgtgaagaaaataaaatattatatgaatatagtgataatagaattttaaaaaatattaaatgtgacttcccatttaagggtacaattagcagacattatttctgcatgagctgtcataaaagatcaaagattcaaaagcaagatcaatttatgtgggaactcaatgtccctcaaagatatgagtgctcattacaagaaattatcgagaatgatggatatgaaatgatacaagattattcttgtttatattgtcaagtttctgcattattggtaaacgaagcaaattataactttaataatgacgattttgaaaacaagaatatatgtcaattaaaagctcttttacctattctaaagataaatagtgatatacctaatcatttgttatattatattaaaaattacgataaaaatagatgtgttcctagtaaaatgaagactactatagttagaaggtcagccttttcaaaactgccaaaaattcttattatgcatttatcgagatcaatgtataacggaatggtaatggcaagaaactcttgtcgggtcacattcccagaaatactagaactaaatcagcaaaatctaggtgaagatggcaattttcaaatgaagaaaatgaaatattcattaaaggctatggtaaagcacactggatcacattatcaaggacattatcaatgttataagcaaaagcctaagttagtttttaataatcaaaataaacaatttataaacaaagcaccgactataattgaaagaatagatgatatacaaaacaataaagatattgaaaaaacaaaaattcatggaattaaaaaatttaaaactatcaagactgtgaaaagttcacctttttggttaatatctgatgataaagtaaaagaagttaaaaattcaactttgcataatgaaaataagtatgtatatatgttatattatgaaattcaactcgaataatattaaatatgcatgtacgtatttacgtatatagaaagagagaaaaagtcataagaattacgttataattaagtgcagcattagcgtcatcaagggattaaaactatttgaaaaggaatgtatattatagaaaagaacatcatctggtatgaataataaataaattcaataatccatgtctatatccatgtctatattgtccaaaatgtgcttggcgtgattatttgagttattctcattgaagttatgcataatatcataatcgccttcattatcgaacaaaggtaaataatttttataagttggcttccacacagtattttgataccaatgtaaccacattttatatattgtacctttccaatctacccacggaatcaatttcatagagtcctcttttatccaatcataaatcctggagtaaataagcacttcgccatccatttgatccttatctcggtgtgcagacaatatttttctaataactttatttttaactgacttcggaaggttaatctttgccttaacaagttttgttacagggttacccatgtctttaatataagagtccctgtcatacttaactacattattatctgataaagaaagcctttcaaaatcttcaattaatttaatacgtttataatctaatatcccaatagaatcgccactattgacgggactgtgaggtctctttaatttataatatgtcatataggtttatttgtttgtttgtttttttgtctatttagtagcaatttatagccttattatttatccttatttaagaataaagccaaaagtaattggaaaataattaaaaagaatatgcaatagcttaaaataaacactgctccacatgtactgagtatatgtgatccatttgtatagatcatttctttaatctattccctctcctatatgatgaagaaaaaagataatgggattgttctccttacttttttcaactaatgaatgtaatgaaatttatatacgcatatttttagatatataacttttttttgtgacgcaagatcaaaaatataaaacgttttttgatcttcatttattgttttacgttaagaaataattagaagatgtacaaaaaaggtagatcttggtaatattatatctttcttgaagataattcaagttagaagtttctataagaagtaagtattattcagagaagagaaacggttgaggaattcaatgttgtagtcaaaaaactattataagataattttattcatcaaaatatttcctgttaacggagtaagttaattttaagcacgacaggaagaagaaaaaagatatttcctaccaattatctatttttgattattgaatctaaagatgaaaccattttatacacccccaattaatagtgaactctttgatggaaagcaagcattaaaggaatcatataactatgaagaaacttctaggtcaccaacttcaagtacctataccaatactgatttagtgaatgggatattaagaaaagatactactttaaacagtaatctatccagttcatctgagaaggaaatattgacatccacaaaaattgaaaggattagatctgaaatccaagaattacctgttgagctgacaaaatatattgacctttttataactgatttgaaacagccaaaatatgtcagtcctttgtccatatcacagttagtttctatatttcagtctttttatacagagtttgataaatctgtatacgtgtatttaatgactctatctgtcaattctacaaatacgtttatcaacgcaagagaagctcttagttctgggttaaacagtatatttgcaagaagtagaagtaacagtgcaacaagcaacattaatagaaacaaaagcaaaagatcatcatctttatttagtgctagttcttttacaaatatgaataacgcaaccccattattatcaccagaagaaattgatcaacaaatcaaacaaaatgctataatcaatgtcaaatgcacgagatatttagagttatgtgagagaggtgttttcaataaactgatagaagttgggacctcagcaaccccagttgaaataatgaatagtactagtaataacaatcaattgaaaaataataaagaacaatttagtgtaaagacattatttaaaaatacccctgaatatatcaaatttgataaaagattaggagaaaaggttcattgtttgaatagattatacttgagcagcaacactgagctaactaaatttctgggtatatcagatactgtaagtatggataatagtgatttgcacgatattataaataataattttacagatttaataataaaatgtatttccccttatgaaaaaatttcaaaattattaaacatacataatatattaagtcaaaaaggtaatgctacatccaatgatgatttcttatcagttttgatatattatattatcaaattaaatcctaagaacatatttcttaatgaagaatttattaaactttttagatacaagaagaaattaatagagagtgagatgtttgcactgaccaatctgaatgcagctctaatgtatcttgagggattaacattaaatgatttacccaatcatctaaaaaataatttaactgaagatgaatgttttttattcaaaaataagataagtgatattattactttaccctcaactgaaaatactatagaagtaattgagagccaaaatatacctaaaatcaacaataaagatttagtcaattcaaatacttcaaatttcggttggactaactatacgggagaaccaaaactgatagaaaatgaagattcggtaataagaagtaattcatacgaaggcataaaatctgttttggatggttcattgaaacacataattagtaaagtaaaagcatataatccagtttatcaagagacagttgttggaccgttaaatccagttaagaatagcctacaattgttcgcagaagttgataaaaaaacagaatcgttactacatttggactcatcaccccttcataataaactaaaggatactaaagtaaatacccaagaaacgttatgtttgaaatgtaaaaccgatggtatcaccttgatggaagaatattgtaagtataaagatgtgccattcgaaaatatgaatatttgtcaattacgtgagatgtatgaaatctaccaaaaattaatagaatgatttggttaagattgaaaagtaaaagatgttctgtttaaatgaatattgcttaatataggaaaattatatattatatataataataataataataataataaattacctatttattttacttttcattatatgtatatatctaaatatttatgcatacccatagaatataaattaaaattgtattagtaagacgtatgggataatttttttatttttctttttattgtcttttcttttagtatagataaaatatacttcttcaaaatgatgataaataatctataattgaatacaacggagaaagaaaatcttggtcattgctaatgttgctttcataatacttagttgaaaaagtctgcaactgtttttttaatatgattgttaagtttttgattgtgtctttagagtaatccaacgattcactttcatcttttaggaatttgacaactttcaatttgacatctatatttgaagtttttgatattatagtgttatgaagaaagcggtttttttcagaaatattcattttctcatagttaagtccatgaattattggaaacgacaattttccttcagttatatcttccgcgaaacctttattcattgtcattgtttcatccgacaggttcagacagtcatctctaatttgatatataattccgagcaactcacagattggtatcatactattttcgatattatgcccagtgtaaaaagtaaataatgtttccattagacgtattgttagcctaaatagccctcctgttttattgataaccatgttcatatacatctcttctgttgggataacgtttgcgtctctccaatagatatccatgccttgtcccctatgcaaattacagatttcttcattaaatattctgtataattgaatttgaatatgattagtagataatgatttaccatttatattcatgtttacatttgtatttacatttttattgttctggataatcaattttggtatcaagttcattgcgacaaaatacatgtaatttgcggaatttatcgtcatcggtattccatatacaaggtgcgatgttttgacacctcgtcttaaaagagaattatcctcaatatcgtcgatcataagcgaagcattatgtaatatctcgatgatttgtgatagagtggttagaacctggtccggcagttgatatatttggttaaagatgtcgattaatctggtcctaaactttttacccctttgctgtgatatatgtagaaatggttttttcaaaatggattcattagtagcatcccatctctgtggattatctataaatgatttaattactaatggatccattattatagatagatagatagatagatagatagacagaaaatacaattgttgagtagatctactgggcaatcataaattttgcgtttctatttgagtagtaactttgttggtaagacttttttctttttttctttacttatttcttaacgtactttttaaatcaaatctttaaagttgtttatcgtttaaaaaatcattaaagaatcgaactcgtgtactttttttatttttcttttgttcatcaaaaaaaaaaaaaaaaagaaaaaaaaagatcaaataattgtatcccaagcaagaaaataatagtagtgaaaattaaacatagacaaaacctcaagatggtaaagataagatgtctgtgtttgaaatgaaaacaaggttattaatttaattttgtattttttttgtttttgtttattaatccaatataaataagacacatatattaattatatagagatactatattcaaaaagatatcttatcatatatatatagacgttaaattaacttgctgtgtagcattctatatatctcactatgttttctcattatatatacatacatatatatatcttaaaaatcacagcatgtctttttaaaatgtgtttttgtcggtgggaaatttgccaccaaaattgacaggcacacccctttttttgtatatttttcaggaaaatgtccatttgaaaattaacaataaaagctaagaaacatgcatagaaacacaatacatagaaatatgcaatcgaagctgaggtgaaaacaaaaacaatacctatcttctatcattaaatacggattttcaaaacgaataaggaaataataataataataatgacaaaagtattagcttttagtttcatcgactgatatttcacaaacattatttttcaagcatcttctttctctttttacttgttaaacaaatagagagctattaagtgtttgtaatgttttagaacataattgacactgatagcataagttactatgataatctagctattcttctttctgtgtctgtatctgtatctgtcccttttcttcctttattattattattattattattattattatttgttttgtcttgttttgttttacttttatcagagtcactccgttaataacgatatattcgagatttattctctctctttctttctttttttttaataccgtttattgtgataaattggaaatgaaacattacttacttatttacttatttttttttcttgtttattttttacacgaacatagacaaaactagaatattttaaaatattctgaaaagaaataatctcttcatatagtactatgtaaaacaaattaattgaaatgttagaatatacatacttatatttattgtcattattaataggagaatggtagaaatcaaagacaattcattaaacataaagagataaacgggaaaagaaataaaataaaatgaatcagtcacaacagcaaccaccaccaccaccacaacaacaatctgtgttcgaagttgctaaagttttacgtaaacacgaggctttaaaacaaagaaaagggttgttccaaaataatccaaccgatttctttcgttataaaagatttctaagagctttaaactctaatgaatatataaataaatgttctaatcaaccagatatctatccatccgttattaattctgagacccatgaattcgatgaagacaaagctaaacaaatctttattatgttaatctctaaccaaatcatcctacctgttaaaaaattacattcaaatgaacttaaagaacataatttaaaaccaagcaaagattaccccaacttgatttctacagataaagcaatcttacagccaaacgaatactatatctggaattataaccctaaatctatatgggattatgtcattgtctttggtatcatcctaactatcttagcattagtctgttacccattgtggccattgaaaatgcgtagagctacctattacatctctattggtgccctatgggtcatcgtggctttctttattattgccattattagattggtcttggctgttttgtcataccccttcactagaggcgaaaaaagtgttggtttgttttggctattcccaaatttctttgaagattgtgggatcgtggattcttttagacctttatatgggtttggtgatttggagacttacagttaccagaagaaaatgaaaagattaaagaaaagacagcagaaaaaagaagctttgaataagaataagaataaaaataaaaataaagatgaagataatagcaataatgataaagataaaattttggagacaattaaggaagttaaacaaacctcttcttctggtgtctcgacaaaaccaattttagaagatgttcctgaagatcagatgtgatatttcatatatatatatatatatatatatatatacaaatagatccttattatttatttatgtagattctatcttaagttctaccatcttcaccacgacttgtagtccattcctttgggccgctttttctgccaattctatcttcacgtggtatttcactggatttcctttgtgtatttcctctggagtttaaataatcctgttcttccatacaataaactctatacaactccgaatcatttaatccttgctgtaattgttttgttattattctgcatactagattaagatttgaatcactgattttatctcttgggagctggttttgaacaatatatttcttactaacatcaactacttcatattttccatatgctatgcagtaactcattttcttgttccaattaattgaatatatatgtggttcatcaaatgattgttcacatgaatctaaatgaacccatttcttcaaatacggagaataatattcattccaaacatgatcctcgaaatttatcacataccttgcttcaagaccaaaagatctcagtattaacataaataagttacaccattcaccacatctaccagttttggtctctaacaattttgttggatcattataccttggaaatcgagttatattattacagcgttgacatttatataactctacattcccacattgaaatctttgttcctcaatcgtagaagctgtcgttccaattggttcttggtatgaatcgactccacattgcttgcatttgggtttattacaccatgtgaaaaaatcatttttaaaatatcgtagtaattctttcactaaattatcgctatattgatcctcatgatccaaaggcattttatctacatttgagtaaattaaatctaaatctaaagtctcaaaaaccttagattgccattctgggttgtcatatatatgacatagccgacgagcattgtttgctatatctctagctattgggttcgtacttataagttgtttgaaatggtttatatcttgagcatcagatggtctcctaaaatataataatatgtaatctttccacttttgcaagaaattttgggccaatttatcatattctattgaatcactcattttatatatatatatgtgtgtgtatatatgtgtgtgtgcatttcactgccttctcttatttgacatctatttagttaacagctaagtccctcaacactaaattgtgaaaagcttagtagcgtgctcaaaaggattttagtaattaataggtttcaaacattccttttttgtctcttttcctttaagttgtgtttctttggtttgataccttttgttttttttatcctttatttttttcttcataaatcagactatctttctatagttctatctatcacatttaatatttggatatggataggataaacggttccaggctagatctaaaatgtagtcttaataacaggtttcattacacataagtctatatagttgcatgtatatttgttagagtacactacactctaaatattatttacaggtttttttaatgatcttactatcaaaaaaagcataacatattcaactattaaaaagtaaacatgttattcttcataattcccaatttatttcattaaaattggataaactttttgttttcctaaacgtaatatcaataatttgccagataataaatgtttattccatgcattaggtaaaatattatttttaaccacattacctttttgtaatccaatagaaacactaccttgttcaattcttcttttagcctctttacgtgaaattttagctatttgcactaataagtttaaaagatcccattctttttgtcccttatataatatacccatcttagttaaaatgggtattaaagtatttgcattaatgtcagtagtgacggtgatagtagaggaagaagagttggtgcttaaattacggaataaaactattgaaatatattctgcatcatgtgcttctttagccccatggatcaactcagttacttctttagctaagacagattgacctagatgttttgaacgatctagagaatgtttttcacagatggattcaatctcttcttgtggtaacaaggtaaaaatctttaaaaacctttcgacatcttcatctaaagtattataaaaaaattgatataaatcaaaaggtgtgttcatttgtggatcaatgaaaattgcatttcccgcacttttaccgaatttggttccattagcagttgttaataacggaacagtgatcccatagggtcctaatttcgtctgtttcaatccattatttttgttgtttagtttttggattagatctataccagcaacaatattaccccattgatcattacctccaacttgaatagtaacgccttctttagagtatagatggaaaaaatcataagcttgaagaatttgatatgtaaactcattgaaacctaatccatcactcatattttgattatttttagtagcgtaaagacgtgaagttatgctatcacgagacaacatttgttgtactcttatatattttccataatttgctaagaaatctaacatcttcacatctttccaccaatctaaattatttaaaacaaagtgtcttcctaaaccaccatttaaatctgattttatatctgtgatcttacttttcttttgttgtttccttaaataatattctttaccattttgaaaaaatcttcttaattgacgactgatattttctacattattgtttctttcttgctggaccatttcagacctttctgtagttctgccgcttggatcacctacttgtccagtagcacctcccacaatattgacaatgtcatggcctctaatatagaaatgtaataaaaccatcataggtactaaattacctaagtggacagaacttgcagttggatcaacaccacagtacagttttatttttgttccattgtttaatgattcaattaattgatgcttagggtttgatatctgagaaattaattctctttgttctaattcagagatgactgcttgtgaagaatagaatcttcttataattgaccttatttttgaaatctttttcactagtggtctgcaatggtacatatcttgtcaatagttttattctctacttcttccttttgagatagatcttgcacctttaatgatcgaactgattcaacctcagcttaggtttctcacatggaagacgggggatgaattatgaataacgaattttctaatatccctttaaagcgaaaaataaacaatgtttcgaagaaaatataaaggagtttgaagattaactgtacaattaagaagcatgactggttttaaaagacatagaagaagcggtaaggaagataagtcaaacatctgatctaattttaatagaaactctgttttaaacacatgggacaaaaaaataagtagaatgattgcaagagttagcaaaaggcaatcacaatatcaacctttaatcaaaagactatccaacaatagtagtagtcatgtatctactatttatggcataagatatatacatttaaggtctttctggcaacaatataaaataacaaagttagaacacttgaataaaattgataatttagaggatatcgatccacggttaattaaaaaattaattgatgaaagaacagatttattgaatgcagaaaatgaattaaagatgttaaaacaattggatcaggaacagaacataattaggaaaaatactttaaaaccttttatcagacctgcctggatactttttttgatgagctctactgtttatatgggatggcaattttattggtggtattgtgaatatgatcgtagggaagatgaattgcaaaaggaaataaataacttagaggagcaattacaacaattattagatgcaaaatccggtttaaaagcagctggaaagcaaccttggtataaacgatacttttggttctaaaataaagggggaaagcaagagagatagagaatctaaatgataaaaaaagaatgatcaacattattgtcatgaatagattaaatatatctatatatatattcattaaatgcatttatatatatcaaggtatctttataaatgtacttatttgataccaagttaataatattatattctttaatatgtctcctcaaaaaaatgtgtttttactaactaaaatgcacttacccgagctttgaggtattgcataagtaaaaaattgtccatcgtctccagcaagatatatttgatttgggaattcttctggaaatcctagataatacctattattggcattatgaatattaatatgagcaaaatctctttgcaaattttggtttggaatatttgctttgatttttttgataaaaaatgtactacttgccttgacctgtctaaatttgatttatttctatattctgtatcaaaattctcgtttatatcaaagtcctggttattttcatttgagtttaataaatataatccatggtcaatatcagagacgttccgatctgtggtttcattatatctaaatagatcatttaatttaaagatatgtatagttcctgaatcacccacacaaccaattaatgttgacattgagttaaaagttaattgatatatattagatgatcgatttccccgtctaaactcaaataatagaggcgtcttactgttaaattgaatgtgatttgaagttatactactgtttggtttattatttgaattaatggtattaattcctgtgttataaactcttatgattgtgcccttttctgatgctgtagtgattaatgttccatcttggtttattgcaagacaggtaatgtttcccctatgaacattatttaaataatttattggtttagtatttattgcatcataaatgataacatctcttaatacacgattattagggtctgatttggtgagatgataagtactaaatgctagaatacttctatcatcgttacttaatgcaatcttgggggtaatattaccttttgtccttgaagttgatttaattttactgttggatccgagctgctctatagcatgtttggaatttaattgattttgtaataatttattaatatcgttatcatgatcacaggtgccattattgttatcattactgctattattattgattgagaatagtgaatttatcttattttcccataaattgattgtctctaataatttcatacacgaaatgtcatagatgaaaatttgatcactacttaaaagcacacataatctttttctattcattaccacgtcaatgatatctgtaggaaatattagttcacagatggtagatttcctctttgtattgattatcttcaattttctcttatttgttttatttccgttagtcatagtcattagacttgtggagaatagcatttctactatgcaatcatcatattcattaataatgtttttggtatatgaaggagttggttgtagattttctccaaagatttcattaatactctcacttctatcgttgcttttgttatgagtgtttacagaggtctgagtatcattatttcccttcttataactaaaaattagagcactttggttatcattattatagtcatatttattgctactttcttcccagtctatacaaaagcattcaccaaagggatcacaattatagatacatacttttttatggtgtgttattacgcagcatgttgcatcttggttgaatcttaaaactttcatatctggttacgatgtcgaaaagttgtatatgctttgtaaactactttatgtttcttcctttattagactgtcgacagttaaatataaattctagtataaattgctatattgaatatatatcacaatgtattatattttactcccccttctgttttcttctttattttcatttagttttttttatttaactgattgtgcaattgcaatcaaattaaaaggattaaacttttctgagctccttaaagaaaagataaacacataaaaaaagtatatgattcctaatagtggagcaatttataacttataataatatttgtaaattttattattagtatgataataaacactatatatatatagaatgaaatgagtaatatacctaagaaacacagaatgatgcttatataaaacttagtgaatcagaagtcaaaactttgttttgtctgtcttgttggagttgatctattatttaatggcgaggatacgttgtttttttcatattcatgtgattcatctgtatcatctactgaatcatccactggaatagaccattcttcaattttgaaactctttttactattcttgaatgcatattccgcatgtctatgatgcatttcaccacgctcactaaatactggcaatttaattaaatgaactaacccatgctgcaccttatttggttgactcttatatactttttccaaatactgtagcatttcttgtgggaatggttctaaatcaattataccatcaaataaggactccatttgattctgtaccaggtatgataatggttcttttgagactgtcatcatcattattgttcggttaccaaattttttgacaatactcttcagtccatgtaataagcctatagcatttgctagtgcatacatttgtggtggatacattgctgggtgtaaaaacgatggcactacaattctgattaatttgttcttatgtttctcaattaaagattctaattgattcaatatttttgtaatgggttgtaaaggagatacaaaggataattcctgaggtgtagctgcaggcatcaatcttgatgttatatcgaattgagatatatagtttttatattcttcagattgaatatcattaccattctcgtcgttgctgccaacagagcgttttttaccagagttttcatcagcatatttatatttccaagcaatttttaaatctgagtaccttgttggttgtgacctggcctcttgaagagctaaattggagacagataactttgattcttcttcctgaattttggattttttaatctctttacgggatcccttgtactctccaggtaattctttggttaaaagttgattcatagagagtacaataacatgagtattgccttgtatatttgggttttcacttttactgactctattgtgtactacaccttgaaccataaataacttgcaaagaatggattgaaagtctgtagtaccgtcttcttcaatcaacaaggaatgacctaatggtagtcccatatgggataaaagtttatccaaatcgtaacaaccagtggaggagactatattatggcttactgtagatggccttacacctggatgatttagattcattaataattttgtattttgttctgttttatcaattgaaagaccatcaatattgttttccttgttaatgtttaatctttttattccattaacaatatctaagccaggtccattactagcaatgggccctcgtgataatactggttgtcttccaggaatagctaaacgggaactattaacattgtctcttatggcacttactggacctctatttggcaatacaccacccctgtttggtaatatagattttttaattaaattagggttattatttctagttccactgtttatcacttcacctctctttctaaaagacatcttgttcgcttatatatatataatttaatactaaacctttattaaaagaaatgctatgaattgttcttattgtttgttaaaggttatcaatgtatgtattattaggcttgcttgcactaaatgatacaggagtatatgctacttgttattcctttctacatcttgaataatagtctgtacattaaagaacaaagatcgatgagcttcttctttttcttcttcctctttaagaaatttttcaagagtttttttaatactattaaaatgggtgtatgtgattctcatcacagccactgccaactatcgaaagaatagcagcctcacacactggggaaccataccctggatcagtcgggtatgtttttggatttacattagttctgtggatgtaaaattggatataaaacaaaataaacaatacacaccataattgtgttttacataatgtggatgaataaattcaattttcatttatctaagataagattattacaggaaacaccattgtcaataacgaaaaatactggtctaaagtcaattaaatggcttagtccaattaggagtgttcaaacaaatatagattgtagttcctttgtgccattttctttgaagcaaagaaatgaccaaaaatcacgtaacaaatataaatataccaaatggtttggtaaaggtttattaactttattagtaccatatacaggctatgcaatttatgttactctttctacagcaaaggagatagaatatagacgtcaaaaatgtgatagtttgatttctaatagaggatctttaagagacacagagacaaccttgataaagtattccccattacaggtcctcgggagatacgaaaatccatttgtagagtatagaatccaaaccatacacgaattcttctttaacagaataatagaattatttgaaagaaataggggtggtatcccacctgataagagacaaatgaacaaattaatgcctgttcataaaccccattggactaagtctgataattcagatggaaatttgtcaatggagaaagattgtattataaattataaaatattggatcagcaggagacgaaaactatgttttcaaaggggaagaaccaaaataatggtggaagacaaccccttttagaaaatgttgataaaaattcaatacctatatatagcacttggttgggtcaatcatgtaattatattgaatataataatcttaagatcttaacagatcctctttttagtgattttttaattcatgaaactttaggtcctaaaagaataacaggtattccatgtacaattgaagacattccacaaccagatatcattcttgtgtcacataatcatcctgatcatttggatttgaaaagcttaaaccattggaaaaatgtagatgacacattatggattataccaaagggtatgaacaaatttttcatgaaaaataatgttaaaaattttattgagttatcatggtgggagacatgtcaactagaaactcagaatggtaatacatataatattacatctactccagcaatgcattggtcaggaagatctattttagatacaaatgaaagtctttggtgctcatttatgctaacacataagaacaagccaattctttttcatgcaggtgacactggatatgttaaagatctttacgttagaataaaaaaggcatttggtggaggctgcagattagctttattaccctgtggacaatactgtccagaatggcatcaaaaaccaagacatattaatcctcaagaagttattaaaattatgtatgatatggatattgaaaatgttttgggagtacactggggtacgtttgtattaagcggtgaatactttttagaacctaaggaaagattagaaaggttagccgaattcaaaggtgtaagagatagatgttactgccctgagttaggaagaacagagaaattttaagttgaaagaacttcttcactttaaatcttttgttaattattatttggatagcacactttattaattattgacattattctaactggtgacagatatcataatatatgtaatggcacgtctatatatatatatatatatattatctttatgattgatcttaaagtattaataataataaaaaggagcaaaataatatgatggaacacaattatttttttttgataaatattatatacatgaataaaaaagaatatgtattttctgaataattgaacaagagtgacattctaaaatgttgttttaatattgtttttttatcattttttttaaatattgaataattattctgtaaaaagccattaatgtttattgttgccaataaattgagttacatgataatcttttaaaaattcatcattcactaatgcaggactcttaattatctgatcagctcctgtaattgacttagggaaagcaataacatctctgatgctggttctattaaataatattgtacacattctatcaaatccaatagcgaaccccgaatgtggtggtgttccgtttttaaaagcttctaataagtgtccgaataattcatgactgttgtctatttttagaatatgtttgaagatatagtcttgcaattcatgatcgtggactctctgagacccgccacctaactctacaccattcataactaaatcatagtgttttcctatacatttcaaaggatcattctttaaattttctaatgtagataacttaaccatcgtaaatggatggtgtgttgaaacgtatttgcctttaatatatgttggatattgttggttctctcctaagtttacttcttctactggcgaaaataaggggaaatctacaacccatattgctacatcatcattaggcccaggagtttctctgaaaagagtactcattttcggtttactcaatattagttgcctaagtctacctaaaggggttggattttcaaagattgcgtgatctggttgtctatttgatacaaaaattagatcacctggtgacaattttaatgattcatccaatttttcaactatattctttgaattagggcatttatttatcgcagataataatggaaccttttcaaaccactttttacaaagtgcgttacttgtgattggaacgccaaaaggagctctgaaattataattcttaggatctaataaatgtttccagcgattttcatagtcattttctatatgacttttatcgattatgccttttaatacaagacattctataatagggaaatcagtgttatcttctgatgtacaaccagttatttcacttatattgattatttttaaattaggagcaattagattaggtttatctattccgtataaagtcatcacttcattatatgtcattgaatttagtgttaaagtaatcttggaatctattaatttattcgaatcacaggtataaagagtctttgaatcacctttttcagtccaaaccttaataataagttcttgaatcaaacttctaacttttgtatctttgacaaaggatatttccatatctaactgagtaaattccggttgtctgtcctttcttaagtcctcatctctaaaacattttgcaaattggaaatatctagggattccacttgccattaataattgtttatattgttgaggactttgtgttaaactgtaaaatagtggttttcctgaggctttatctattgttctagttggaacaacaaattctcttgcaccttcaggggttggtttaaaaaggataggtgtctctacctctataaaatcatttgcatataaccattgtctcataaagtgattaacttgaaatcttttcctcaacaaaagctgtttttgagggactctcagttgcaaatatctatattcagggggataatttgtttttaagactttcctatcatattgttgatcgattaattgagagggtttaacacttgctttattcagtgttattaaatcagataggataatttcatattcttgctgttgattggattgggttttagttggatttttttttaggttgtttctttagactcagttgacctttgatctgtacacaactctctacactattacatgcttttaagagagatggctcgtgtttgtccactaattggattctagttccatatgggtctcttaaagtagcaaaatataacttgttaccaattttttttacaggggagtcaatccatccattgatcacaaatgaatttttcgttgtatcgtttaagaaagatttatatttagttaatgcgtcattaatagatgtagtaacttcttcaaagtggaatttattttcaataactttcttattggggaaactcatttgcaattttgatagtatactaagatattttctggatagaaatgatttgtaaaaccatttttgttgttgtggtctcagcatgataagggggggaacaaaatatatatgtatattttgaaaatatgtggaataattatttttattactacgatttcaattatttcattaaagagaaaaaaataaggaaaaaaagaaatcaacctcttcaatcactttgtagtttgaaatttaaaatacccttaagtgtgtttttgtatttgcatacgtagatataatggtaatttggtatatgtatgcatcgagattgatcccataaaagggtggaatgggggatgggatagatgaaaaggctgaaatgctcgagggatctccaagaaaaagtgagaaagtaaaaaaaaaaagatgtcaaaaaaaaaaataatagaaatgaaaaggaagaaatggaaataaacaatgaataaagtaaattacaaaggaaattgggaatatattaacaatgtatgcgtttgtaattgaggatgatataggacaaggtggtgatagtttttatttatgtatatatatagaataaaagggatattttttttcgtaatttattttattttattaagtagctgtaatgttgcattggctataattctactcctaattgtggtaaattattaaactatctcttgagctcttctctctagtttttccttttgcttctgtaaacgtttctttctttcaaattgagcaaacaccctaatatatattgggacatcagaccaaccttcatctgtctcagcttgttgttgttgttttttcaactgattacgccttttagcttcaatgacactttgtggtaatgatgtgtttctactaggaaacaattgttttaacgattgtagtttggaatcaatgattttgttgtcagattcctgtttttctatttttaattttgtaggatgtagagtttttggtaaattctttatgggtagtgaattgagaggcggatcccagtcttctggccatacatcatttgtattggagatttctttgatagcagccctacgcctctgttgccaatgtctaagatcttcgttataatattcccaaacacaattgacacaaccagacatgcagcaattatcgggttctttcggtctattgggtactttgacaccggcgatgatacgataatctgcatttactatatatctactggtggatttagatggttttaatgaggatttaccctttatactatttccaaaaattgttgatattttttcttcagccggcacttgatttgtaccaccaactgctacttgtccttcaaaggtcattaaagaacgataatattgtttagatatcattttatagaaatatcgggataatatcatgttgttttatgttatgttatgttatgttatgttattgatggattacaactttttgtttttaattggagtttccttacttgtatatatatatatatataaaagaaaacgtatggacaaaaacatagaagtttcaccgttgatcggatttattagcacacaaccaataactgtgtttttatcataatcagaggactcatagtgtttggttttatagagaaacttaacgagcaatgacgagaaaggatgatattatccgtgagtctcaaaccaaatgtgaaatatttattcacttaagtccgattcttacaaaacaaaaaaaaaaaagcaaaaagaaaaaaaaacggaagcaaaacaaaatcgaacccagaaggaattgttcggattttatgtgattcattgtagaagaactttgttcactcagatgctcatcgcttctggatttcccccagtttttgtgtttatgttattagtattggcgtcagtgtttagtttggaaagtctctccaatagtgttacttctttctttattttgccttttagttctgtattaatatcgttaaaaacagggattatcttatctgtaatcaattgagagaactctctattgttattattattattatagtagaataaccaagccaaataatcgataatacgctgtctttcatgtttagatgactttaacgtatctatagatgataacaatgcatcaatatcgaaattctcagacatccaacccatgttcaagtttgtacattcttttgaatcagtcagccagaattggctcctctgatctagataatcttctactgtttgaccagttctaacctttatcttaccacttgcctttttcactatcacttcgcctgtctcattatttaaagttactggagtagtcacatttttgggaactgttctgtcgacatccattgtcaaaaaagagaaagaaataaataaacaaaaaaggaatagacagctagatgtaactactgcacaggtgcttacttcaggtacctattgacttatatatatttccagtctgttttatttaaccttgccctgggtccaatcttcatttttttttgtcgcagctcgttatttatatttatatatatttatttatttaatttcttttttttttctaagggtaattcttctcttttcaaaaatgctgttgggtgtgtgggtgtgtatatatatatatatttttttttttctttttcgtttttttctttttttcttttgaggaaagtcaaatttttctgttgggtttgaagaaattctatgataaataatcttggtgtttagatggatctacatatgtctacgttcaagttattgatagttgagtatgtgtgtgcgcacctatgtgtctatgtgccgcatcatacagggtcacacggtggtaatgaattacgtataatatacaacagagcacatatcgtaatataacaaatattgtaatatcggtaaagggggaaagattggaaattttgcattggtatttgtatttgcatattagctcactcacaacagttatacaacagtcacacaatacagggttataaataaacaataataaacaaataagcaaataaataaataaaaatgggtaattattttagtagtatgttcgataggttatggggtacaaataaagaattgaggatacttatccttgggttggatggtgcaggtaaaactacgattttatacagattacagataggtgaagtggtgaccactaagcccacaattggttttaacgtagagactttgacttataaaaatttgaaattgaacgtgtgggatctgggtggacaaacttccattagaccatactggagatgttattatgccgacactgcagcagtcatctttgttgtcgattccacagataaggatcgtatggctaccgcagctaaagaattgcatatgatgttatctgaggaagaattacaggacagtgctctattggtctttgcaaataaacaggatcaacctggcgctttgtctgctagtgaagtctctaaagaattgaatttggttgatttgaaagatagatcttggtctattgtggcatctagtgcaattaaaggtgaagggattacagagggattagactggcttatagacgttattaaagaagagcaattataatcatgttacactgcaatatttgtataatataacagtttaattaagttctaacctcctataatatgtatgtacatatatatatgtacatgggtatatgtatgtatatgtatatctgtatgtgtggttatgtagatgcctggatgcctgtagtaaatagcatataataaattattattacttgaaacgatttaaaggatttggacgaaaataaaattaaatggaagaaagaaataaagaaaaaagaaaaaaagggaagtggaaggaggagggggcaggtagagacgatatgaagtgaagtataaacaaagagagaaaatctatatatactcaatacatatatgatcgtacataatgtttcagttattagtatgtacaaaaatccaatttaattatatcataagtgacaactaaatataatagaagtagaggcagtagtgataatattcaaatatgtttaaatttactcgaagttttattatcaataacaggaaacctttagcatatattgtgggttgtggtgggggtggactacttctttcaatgaaattacgacaatcttatgggtttcagagattaaatggttcaaaaaataaaaatgatatagttcaattggatttgaatccaaatttcgattcttccaatatattggctcctaacccggatggtgatacatatgaaatgggtttatacttatcttcaaaaagagaaaaagaaacccaagtactgcaagaaagacaagctcaattgaaccaatgcccgtcctctatattaaaattactattaaagattaaatttaaatgtcaagataatatcgttgttcctatacatacaatgatacggtttctagaattgacgtgttttgttcttttacctatctttttaacgtatcctatcgttactttatcgttaatggataagatattatggtatagactaataagatctttatgtcaatatgcagggcctagttttattaaattgggtcaatgggcatctgcaagaaatgatttattttctaacgatttttgtcatgttatgtctgctttacatagtaatgttaagcctcatcccatacaatattcaattgacactctttgtgatctatttcaggttggtgatttgtatgatgttttcgaaagttttgatactcaaccaattgggtgtggctcgatagcacaggtacataaagcaagatggaaacataatgatgataatagtagtagtaatgatcatgtatccaatgaagttgcgattaaaatactacatcccaacgtagttgatatagtaaatatagatttaagaatcatggaaactttagccaatttaattagtagggttccaactatggaatggttatcattgaccgatgaagttaggaatttttctatttttatgaatatgcagttagatcttcgtattgaagcaatgaatctagataaatttaaccgtgatttccaaaacgatccattagtttctttccctaaaccattactacagtataccacaaaaacagttttgtttgaagaatatataaatgcattgccaatggaacaactcttaaatgagaagaataatctgaatgatatcgatatctttaaagttagtcatccctttgtcatggcatttttaaatatgatgattataaataattttgtccatgcagatttacatccaggcaatgtcatgataagatttatggataaatccacagaaaaaataaataattcaattgttgatcaattgagtcaaaattatgggactccacagttcactgatattttaagaaaagcattacgttcatatatacctcaaatatgttttatagatgcaggacttgtcacagaattgaataatactaatagaataaacttcatggatttgttccagtctcttacgaaatttgatggatatcaagcaggtagattaatgatagatagatcacgtataccaagcagcgcaattgacccattaggtttttcacataaagttcaaaaacttgtcactcagattaaaatacaaactttttccctgggatctatttcgattggaaatttgttaaatgaaatgttctttatggtcagacaacaccacgtcaaaatggaggctgattttgtgtcaattgtagtggcaatattgttattagaagggattggaagacaattagatcctaatttagacctttttgaatcttcgataccgttattgagtcaatattacagagagaaatattctttactaaagggtaaagaagaaataaatgataactcattgttgaatgagacaaagtcatggcaaatgatggtaatttggttaggcttacaaactagaaggtttttaagcatgtctttaaggcaaactgatattttgttaaaatctgatcaattatcaccaaactactgaacaaagaggaaaagaacaagaaatagataattctttagataagaactatagcaataatattcaagtatccatataaataataagtaagatatttatatacagaagacaagaataaagcggtttaactcttttttttttctttttttcatgaaataggagatggatatagtaataataaatcaaaagagtggaaggaaaaagtggaagagagcaaggcagtttaagtaaatattatatattacattaaaagacattatataacaaggtcatgaatattttatatatacaatagaaaatcttatagtaaagtttcgcctaatgcacatcttgcaatggcacagccagcagaaattgtgtcagaaacatggatatcatttatagccaaatctgggttacattcaacgatatccaaagcgactaaatcaccagtctcggctaatctttcaacaaggaacaaaccttctcttagtgttagcccacctctaactggagtacctgtagctggaacaaaaagcggatctacagcatctacgtcgtatgaacacatgatgggacctctcccaccattagggtgtaaacactccaatgccatttctatgactttattgataccaaacttgtcaacatgatacattgaaaaagcttttatacctaagtcttttataatttttttctctgctttgtcaacatctcttaatcccacgtagacaattttgtttgggtttaatttaccgggaacccatttaaatgattcagggcattcaatgtctttatgtaaacctaataaaaaggagacaggacagccatgtaaattaccggagtcagttgattctaaggtattgatatctgcatgagcatcaatccagatcaatccaagatcagaataagcttcttggacaccactaaccgtaccaatagcaatagaatgatcacctcctaatgttaaaacgaatttattatcttgagctagtttagacacattttcgtagatagtctttgtagtggtaccgacaagtccaggtctttttgtgttcttaaatcgatctgtaacagcatctttctccatcattttttgaagatattcttcatctaggggagattctacagttatatcccagccaagttcccttaaatccgattccaatccatgattcaacatatatttaggtcctttttctacaccagtcttaccttgaccaccacagaatggtgcttgaactatagccaattgacggtttttaatgtacttgtaatgtggttcagttactgtttccaattgagtggtaatcttagtcatcttcgttattgcttgtgtatgcgtatttgttatagagatattcaattttctcttttgaaaccagaaatataatttagtaatttgtgttggatatgaaggaaggataaaaagagcatcataaaagaaagaaaacacctttttgatattaactgtattgacatgcttttggaatggatgttaggtcctgcttatataacaaataggtcatcgctacttcttgcgtttagcgatcactttagcggttgaaatagattaaataaaaattacactgaattagaatagaattatcctaaacttggtccaaatataatctatatttaaaacagcaacgatatatactaataaagttatcaagttatggttttggttatgccattggtctattatctctcttgctaatcaatctgtttgttgataagtaaaaatgtccattttgctctcttcttatgtcttttgtttgaatccaccgttatcaaaacagaacttaaacaggcggacaaaaaaaattcgaccaacgttttattgtaattgcttattgctattgttggttcctttgttttttgttttttttttttttcgtttttgctttattcatcattgccgtgcataataaacaatacattttttttaatggtttttaaaggcagtaacaaccgagattatctggtgtatgggtgtcgagtggcgacacacttccatacatcacaaaaaatataaaaaaggctagaagaaaaataactcttataacaaatatagtactaagataatgatttccgaaaggttaccaaataaaccaaaaaatatatattagataattcatcaacaatttgaagactgtttataatttttcatattgtagaaatccaattatgtctgggaaaaatgtgcttttcgggcgtgtggtctagtggtatgattctcgctttgggcatcgcgttccgagtatgcgagaggccctgggttcaattcccagctcgcccctttttttacttcatgtaataactatctagtcatcatagttttttttttgataatagttgatttagaaattagtactaataataaatatactaatataccaaaacaacacacagtctatacttaacctttctttttattagttagtcttccttttatcttccgttggttacttttgatttatatgtttgttttttttcttcttatttcctaaaataagattagtatgtaaaaatatcctaaaaacaagaagtcaggaaaatgagagccattggtatttttccaaactaatagtcgaaattgtaactcataaatatcagagatattacatgctgaaataaaaataggtagatctgatcatttgtaataaatgaagatctattataggagatatgtcttcccagaatataaaatatgatgagtaattcttagtttttttctctatagagaacacataaattatattctatttaagaaatggaatgaaaagatgagtatatatgtaagtgtctggtgaccgagttagttttgggtaatagtttatggtgtatattcaattttttagaataaaatatacatttcactaggtataaaaaagttttttctatatatataaagggactaagggaatagacaagaggtcaatttaaaagaagagatgagtagtggtgtatagtactaattctggttttttattcttgttttttttttgtttaatgctttcttgatggataggaataaaaatgagcgggaaaaaataagatagtgtgtcagaaaaaaaaaagtgtcacaaattccccaaaaggagtgatacagaaggaataaataaaaacaaatactatcctatatatatataaccattgtagaaagaaaaaattggaaacatcctttttgaaggacagactttgtttaaaagaaagaaaaatgggtaaaactattattttatgttttgatgggacttgtgaaaattttggtccggatccttttaccaatgtattgaaaatatatcgacttttggatacacgttctcaattatgttattatcagcctggtattggtacttcaggtgactttgatgcagtttatacctgggcgagatatctttcttggtccagactgaaaaacgttttagattctatgtttgccttttgtttagatgaccatattgtgtcagcatatttatttttaatgaggcattatgagattaatgatcaaatttatatgtttgggttttctcgtggtgcatttatagctagagttctgactggtatgttagaaagagtaggtcttttgaatgttgggttagaagatatggttcatatggcatggcggatctatgaaaattgggaatttgctgagcaacctatacaacccagttatatgacaactttgattcaagagtttaccaagactttctgcagggattatccgattaaaatttatttccaaggtttatttgattcagttaactcggttgggctatgtagagatagattgtttccttgtacacagagatcaaatattattaaacatgtacggcatgctgtctccttggatgaaagaagaggcaaatttaaacaattttgttttacaccaaatccgtacgaaccaatattattctccaaaaaatataagccatatgaaaaggaaattattaaatcagttgtagctactccgattttgaaagcaagtttatcaagtaatgaaaaacagccgttattgaacaatgaaggtgagtctaaaataaatcagaaaattagaaaaaatccactgattgagcttactttaaaatcttctaaaagtaatagttcattcagtagtttgcagaatgttaatttgagcaatgtgtggactcctatcacagagcagacagtattgataaatcaaattaattcattcttatcaccaactgaattattaacttttacctccagaaaagttgtttattcaaataagagtatcaaaggcttaaatgacaaaaacagggaatacaatattgataatgaaaatgacaatcttggaataattaaagtattaaaatcacaagaagaattaccttcttcttcaatgaatctatggaccatggaaaataatacaagtagccattctacaatatcccctgatttgatagaaaaatggttccctggagatcattctgatgttggtggtggtggcggggtttattccggtgatggacaatgtatcagtaatctttctttacgatggatgatagcggaggcaattaaacatggagtcaaatttaaacctggatcgataaatagatttgcagaaagatatagttcaaagaatagtctcttttcatgtctgcatgactttttagatataaaaaacacaaatatcatgggtggagttaataagagttttaatcaaggtttgatgattagagatataaacgatacggtcaataatttactggagaacggatttgaggaagaccataattgtaatgataattataatagcagtcagagtgtggcgaattgctataagattaatacatgggtatcattattttggtggatattagaatttctacctattggtataagagtggaggatgaagaaggtaagtggagaaatcgatatgtaccgaacttaggtagatctagatgtgttccagagtatggggaattgcattggtcaattatatggataatgaaattcaatgaggattatcgacctaagaatgttccaagatatgttagagaggtgttatttgaaagacttaatattaatttattaaatattaagactttggatactttaatattagatgaaaacgacaaaaaagatgaattgattgcattaataaatgattggatagtaagaaattgggaaaatattccagatgatttatatgaagtgattaaagatgacccaacattataaggaagagtggagggggaaatggagcaaatagggaaagagaaatggtatatatatttatatagagtaggtcacatagcaaataatatacagtagtaataaagtataactactacatacagggaaaaagaaaaaagatggaaaaaaagaaagagagagagagagaataattacttttaagttaataagataactaaaaataagtaaataaataaataaataatatgataatatggataaataaataagatttgtatttatacgtatggtgctaatttgtgtagtgatattaaacacggaatattaaaaacagaaagagtagatatatctaaaagaataatagaggattaaagagataagaaagtaaaatttataaaggggttgtcaaagaaaggaagagaaaagatactcgtatgtgtatacatccatacatttatgtacatatgaatatgtgtgtgtgtgtgtgtgaggggcgggggtgtatgtgtgcgggtatgcgagtttatcttaaactctaaccaataacaactttatcttctttaaattcatactttgggatttctaagtttaatggagcaggaccctttctaattctaccagagatatcataatgggaaccatggcatggacagaaccaaccaccgaaatcaccagactcaccgattgggacacaacccaaatgggtacatatacctaacatgatcaaccattcaggtttttgtactctgtcagcgtcagtttgtggatcctttaaagcagagacatctactgagttagcttcttgaatttcgtgtggagttctgtgtctaatgaacacaggcttaccttgccatttgacaacaacattcttaccttctgggatagcagccaaatcgacttcgactttagccatagctaagacatcagcagaggcactcattgaagatatgaaagtttccacagtggatttggcaccagcagaagatagtaacccaagggaaccgaccatgaaataggtgtagactcttgacttatcattggttctattttccttgacgacatcaccaaaatctgggattctgtaagtcgactttagtagtcttgatgatgtagaaagagacattttggttaagttttgagcgattaatctttttgagatactattggtggtttgtagacctcttaacatagtttttgtgcctaacatattttgtttttgtttttgttttttttggtttagtatatgtgtcttatattgttatattatgttgttataattgagaggatgagtagtttttttttaatatatatatatatatgtttattttcctttttccttgtttctttactttaaatgtttggattggcaaatgaggggaagattgaaggtgtttacgtgaatataaagaattttctatatggagagttgataaatttgattcagttattttttcaggcgtttggaaggttactcttcattgaataaagagagagaaaattataaaaattaaaagatgatgaagaggaaattgtttgtaaggctgaaaagtatatggagttaaaagaaaatgggggaaaaaatatataaaaagaaaaagttgacaaacaagttagaacacaaatagtaattggaatttaagagagacaaaactttacgtatttccaactgaatcgtctaatgcacatatgccaagtgaaacattctctccttttaggaggaagcaagaagaacttactaacgatgcagttgacacagtaataaatcttgttgcgcatttacaatttatttaaatattactggaccttttctttctggcttttcatcttatttggtctctctcttaattcgtcctctattcaccaattctgtttatctcttccaaaccaccacaaggaaatctcggacttgagcggaaggagaaggaggaggagggaagagaagagaagagaagagagatagtgtgagaaagaaagtgagaaacaaatgaaggtaactgttttgaattattgttagttagtgacgaaaagaaagaaagtgagaaacaaatgaaggtaactgttttgaattattgttagttagtgacgaaaagaaagaaagagagaaaggaaaacaaacataaatttggggacacgcaggcacgtgactatttatttttttttttccttctttgtgattggtccgttgactttataatagaaattgaaattgaaattgaaattttgtaaagacagtgatgattttgcgggatttgttggattgtgtaggtgtatggatgtgtgtgtgggtggttttttttttttttcttttattactatgcctattatttattattttaaactgtaaaaagggtatcgatagggttttatgtgaaaacctgtctagattaaaaagtacaaaacagtatcggaatatatatgcgtatatgtatatatgatggatgaaaggattcaggaatttttacaaagaaatatgcatttatttattagacgctaagaaatggctaaatatagttttgtaaggcatattaaatgtaatccaatatttacacatgatattgggactactaatctggaacaaaaagataaatcatatttggacgcattgtcaattggttcaaataattcctccatcttggataatgtattattaacaggaatctgtcatggtaaagtaccatttattgaaaatttatcataccaaattccaagaaatcaagtcgatttaaaacttctttggaagttacccttccctgatgctacagaaattcataattttgttcactcaaatgatatagttgcagaagaggtggacactccaggtgctatatcttatagagccagaaataaatactatctttatttccctgatactgaaaaaaatgttcctgtaagtagtgattttttgcctggtgatcaatatatttatagattagtgggcattgggaaacttatgtttattgtccagctatctaataagattaaattactcggttggaaatctgaggtttctgatttccttatacctatactaaatcaagatttgactgattttattattgggaatgatccaattatcaatttcaatacaaatgctggcagtgtcccaataaaagataaaccctgttttgttatagtgtataatcactgcattgtaatggcaaatctgcacgtatctaaagatgaaaaggatcttaaactgatcataacaaataaaatccattcgaatcatttaaagatttttgatgctcatctgtattcagacgtacaccgtataattatcccaatacttttatctaccgatggtaatgcatatttttataatcaaaagcttaacaaattgtactttaaaatatcatcagtaaacagaacactatttaaggtacatatattcaagaattattgttttttatttaatcatgatgagttttgggttattaatatggagtcccttcgccctgcaagattatatttgggtattcatccattaagtattttccatatcagtgacaacatctttctattggctaataattcaaaggtctataagttgacctttaaaaatcaaataaaagcaacagtatcagctcgttctatcatatatccactgggtattgcactcagattgctacccctacattcaagacctgggtatagtttggttctatctcaatatgtgtttgaagataagactattccccaaataaagaaacaaaaggggcttcatgtatctatatttcataacgaaactatgaaaataattagtacaaaagagatatgtgatattgatttaatcgaatatgtcttgatggaacctttgatagttaattcttcatatgaaataactttcccttgtgattggtttgttataacgtatagaaaaccgtcatgtggttcaagctgggttttattaactgttgaggatggcagaataattcaaatatataaggaaggtcaactggatgatgtggcgacttctattttcacagactattctagttttggcaggactgtccagatatgcataacaacaggtggaaaatttcatttgattacactaactcgaaagaaggggaaggtaaaagttgatactaaaaatattatttctacttcaactggatcttggaatatcggtggatttttccaaaatggactacttcaattgataaacccacatcatggtttatattacagtgattcaattacaggtgataaagagttagtgaaacatgcactaaaaactaggccaaggatctttggtaatgctataattattaaaacagctaccaaggttttggatccagtgaaacaatggggaaacactcttggaatagagaatcatagttcatatgacaatcatgcatcaagccaatttttatctgggcatattacaaaatatatgtttcttcaaaattgtatcgaaaggaaggatcgtgagaaaattctttgtgcaatggtagattccgaaaattttgtctatttgtgggatgatgtcttagagcatctcccaaataacactatagttgttagaccaataattaagtttaggcccaaagtgagaataattaatataactcctatattgcaaaatttcgaaaagtcggtttttggggataaaagttatggtatcccattattttttttattaggagaaagtggagtggtttatgtattatcaactctagaagagacaccaattattcagccatttctggaaggttcttttaatactcaaaatactttgccggaaggcaattgtgcatctgtgtggttcgaatatgatgaattagtttatgtaaaacattctttacagttagttcaatagaagttatgaaattagtcagatcatatcatttgttctttaaaaaaaattgattaattgtacaacgaatgattatagatattcgagttgatatatatggacgatgtactataatgctattgtaataatataagggctttttaacatatcaattacactttactttatgatagctagctttttccaaatgtattaaatatgctttttaacaaaagagtgcgttaaattattgtaatgttagtttagtacttttaatattttaggtctatcagcatccggtttcaataaaaaatgatgttttttctatttgcttattatattatgacttagataagtttttgttctatattttatataaatatatgtatatatatttgtatataataataatatttatacatttaatcttcatgccacttaccagttcttttatattcgttgtatactgatttgaagtattgtttacttgagttgtcaaggatagaatttactaaactcaactcgttttgtgatagtagattgaatacactataaatagatggcaataatacacttctatcttgaatatcaaatggattattgattgataaatgaatatatttcactaatatcattggaacatgttttcttaatgattgtttgattaaactaaccttagagtttaacttttgtttactattagactgattgtttgatatattgcttggttcacaaaaatttgtaattaatcttgctaacgatttggttgaactaatatttaaattgagttctttactccttgaaattatttccaataagcgacagaacaaagaaattaccaaatggttacgattagataatttgaccctatgaattaagatagcattggatatgatcttggttgaatttaagaagatttcattgttatggctattacccttttgaatgaataatagattgatttttaatgataatggaaatagtgtttctatagcaaattgattgaaaaggtatggtttagatatttctaacgcttgtaaagtttttagaatcgatatgacatgaggtgagaatgtgataaatttttcaaggttagttaagaggattgataaagatttgacaaacaaatggcaaccaacaacatttgctttttcaatatgattaatctgaagttcatatagctctagaattgaatcaagataaaaggttgagccatcttcattgattgaattaattgtcataatgaacccgtcattaaaatcggcaatatttgcttttttcactttaattaaaacatcagataaggccagtaacataggttcccttgatacatgtaaccctctaagtgtcatgtattgtggatacaaataaattaagctttcattatacaatgaacaatataataaaaataatgcctctaacagttttatatttgacattgcattcttgtcattcactaatttagtgataatattagtgatttcaatggtttgagcattattgaaaacaataactttagagattcggtataaagagtttaatatccaaagacgtttgttttcatctaggtgatccagacgtgttattttttcaaggtatagttgagtatatatatctcttagattatcaataatatcagttggtgtagtttgaattacactcaaagccagttgatgataaacagacgcaacttcactatttgataagttctgtagaatattatcgatagttatattgataaaagtctggctaatagattctttgatttgagaagtataattattccaaattgtggtgaatatatcaatatttttattgtttttagaaataaagtctttcaattgattaaagtctgtctctaagactgatttatgggttggattctccagcaatttgcataggaaagaaatgtctaaatctgttaatgtttcttttgacgttaaattattgataagtgaaattctggcactcttattaatacacggagatgggatagaattcaagtagatgatagcattctcatcagcatataatagtatcaattcatctaccaaatagaatatgatattttcttcttcaaaaaagtccccatttaaaaataacgattttaagatatggatatgttgagatttgcaaagaaaatgtaccaaagttttgatattatctcttgaaaaaatgctattaataatagaagaccagttagtaaaaagtttcaacagtattacagattttgtattgctatcagtggatttgatatatttaattaattcttcttcaatagtagtaaaatcaaattcttggtattctcttaatttaaagaaataatagaagaggttgcttgataagccagtattacttgctaaatttgtaaaggttttggatgtgaaatctgtaagttgttcaattggtaaaatatcatcatatacatccattattaaatattttatttcccaaagatcagttgaagattccgtttcaaagattttagagagcattggtttaatgtccatcagggtatggtgttccaatttaggtagtccagataagtagacccttaaaaaatttttattaaagtcattatgaataatattttcaccagttattaaatcaaccatatcactaaaaagatcttttatttgggtagttgataacgtgaccatgttattacttagaaaatcagtatattttttgtcatataaaaaacaaagcggtggtttatctttatttgtttctgtatagttataacaataagattgccatttggataaaaattcagggtattctcttgcgttaatatgacaggatatgactttggaccatatattcatggtggaagattcattgctatttttttgatcatttattagattcaataaaatatcaaaatctttaataccaatttcaatatctagatctaggatatgagataataaagaccaaaaatccggatcgttataatgatcactattttttctagcattctttaaggtggtattgaataaattttctaaaaactcttgagataatgtctttttggatgtagataattcttttaaaaggattggggtaacccttggttgacaagcaacaacaaaattaaaaacttcttctaattgtttaaagttacctcttgataaaaatgatatcgatattttaaataataatatggctgaatctttatcaacgttttcggattgatttttgaagaacctttttaacaattgcaaagatggcaaattatctgcaaaaacgaaattatctaataaatgtcttaaaaccccaattgaaccagaatttgagacagaattagattggaactgaataatatattttaatgtggctaatagcagctcatttgtataaacattggctaatttactatttatgtcagttacattattgatatctaatagatagataatttcagtaattaattggtctctgtcattatcagatagctgatttccactgtttttcaaagataacagacttaatatttgtgcaagaatcttacaagaattttcaaatgatatatctattgtggatgttgaattaattaatataactgtattcaatagatttttcaaaaaaaggcttgaattatttgaatctttgatcaattttaaagatttaattagtaatgagccaaatttcagatttttaaatagctttttcaatagattttgatctttgatctttatccacattgaattaaataattcccatattttataatcaactttaaaatcatctcttttctgatcattccatctatcctggattaattcaagtacaaaaatctctttgtgtgggaaatatatcggtagattattaaattttgatacaatgtcatacacttgagcagtggtagtattcttagcacgtaacagtttggttaattcttctgcggaagttatagattccatcttttctttatattatgtaatgttcatatatatgcgataatgatatattttacttgtgaaatgaattgccatgcaaggcaaagagtaaattagaaatgctatctaagacaaaaaggtctgaatccaggcatgtatagttttttgagtcattggttcttctaatcaatataaaacatccaatatgttattgggaataataatcatacagaataaaaaagaaacagagcaggtcatcgtaagattttttggaaaattttcgacgatttcaaaaaaaaactggaaaatataaatgcggaattcaagtcgggatctgttgcggaatagtaatctgaaaggttttcattatccctccggaaaaaaaaagaattaaaagagcaaaaggcaaaaaatctaacagcagaatcgaagaactgaaaagaattgaaataacaaattaaattatgaaagtttatgagatacatcagactccagaagaaataagagaaagtgtaccctttatagttctaggtcaattgagttgggatttataatttttagacagaattagatttagaagaaaataaatatatttaaccaaatatacatattactctaaaaaattcacaacaaatatactttttcttggttccgcttcctctatttattcgttcaaatatgactgagaaaccgttggataatatgctaatggacgttgatactatgaacttcatcaatatcgataaaaataatgaagttgaaactcacactcacacacagcaagttgatgatggtgattcttcttatgaggattcatttctaacagattcagttacaggtaaattaatgatgaagcttacttctccagatagtaatttacctataaagaaaggagaaaaggaagagttacattttcagctaggtccaatatcatctcaaaatatggcttttgttgttaagaaagacaatacaagactttatcctgtctctttacctaaaatggatacttcagaatcatattgcaattatattaaaagagtgttcgatatatatgatagtttgggtgataataaagtttattctataccgacgataggtgttataacctcgagttttgaaaaggatcatacggctacagtaaatttagctatggaaacatttattactgaactagaaaattatattgattcaattaaaacagattcaaaattaacaaataaatatctagatttagaagattctttaactattattaactgtttgaaactaatatttttcgatttagatactccaaatattgataatgtacgaaagagatttattcagagtctgttgaaatgggttaatagatctgatggtgaaccaaacgctgtatacattgaacagatatttcaaatgtcaaatgatagtgataagaacgtttttgatatttctttattttggaatttattgaatcaattgttattaagaggtttatttgaacaagctttaggttgtattgagagatccgagattataccttatctggaaaacatatgtgaagtgtcatcaaatgcaattaaggatttagttcaattggttcaaaattatccaatggattcgatggacacttttagagaatggaaggcacttgctttagaattaagtcaaacgtataatgatagcgagaccaatgtgtctggtgaattacgtgattacattgaagatacacttttacttattagtgggtatcaaaataaaataacagctgcctctaaaacctggtatgaatctttctgtggtatgctattgtattatattccatccttggaattagctgcagaatatttacaattatcgttaaacgcaaacccattagatgttacaagttcatgggagcaaagttgttgtgatattattaacggaaatgtttataatatcttgcctattttagaatctttgaacacatgtacagcttcattcactgcagctttggtagaagcaaaaggtttgctagagaatacatatgaaaatgaagtggatcttcaaaattatgattcaatcatgaacaattttttacaaaacaatgatatttttgatccaagaaatggtatggcatcatatatgttaatgaattttgcatttgaattatgttccactgataataaagatctgtgggctattgccgtcggtttgatatccttgaatcctaaggttaaatctagttgtaaaagagatacattatccgagttgttactacattatccattccaaactaatgatgatattgaatggatgtttggtatttgtgctaaatggaaattgccagaagtttcaagatccttatatacaatgttaggaagtacgatgatctatgaaggaaggacaattgaagctatgacaaattatagtaaagccggtaaatttaattttgtcaaagaatattcatggaccctatttgaagctgcacttttaagaggaagtccattagatgatataatgcttaatgcaattgtcaacgatggttatacaaatgatagtgagtttgttatttcaagagaggttttacaaaatgttgtcacaaatgtgatgagacaaacattggctccatatgccattctttataagttttttcttgcaagagataaaaaagattggacaaatgcattaaatctcttgatgttattattggattttcaatatttgccaaggtattatttagtcatattaatagcagaatttctttatccaatatttttacttgatgattcaaaaatcatcaaggatcaagatgtttttgtaattatcaaacagatggaaagtaaatgggattcttttgataaaatgactaaaaatatctatacgacattattaagtgaatcagacgaaactttaactgaagtcttaccacccacgttagaagaattgaagaagtctgtaagtaagaaattaagcttcaaactttgtcaagaatttatgtaatatgtttttccactgttaaaatttactaaataaaaggaatagatatgttattacagtaattttatacagatctgttatgtattatgtagatttgtgctgtaaagtttatgtacatgtatgtgtgtgttttctttttaatagaaagggtagtagtcttttgtttctactaatcgttgtctttcttaatctatttctctggttgtcttttgatttcttgatccttttttcttgtctatttgctcaataacagaaaatgaaatagaggaaaggcgaaaattttagaaatctgaaatcggctttttcgaagttagtcatcgcaacgagagttttggaccataaaaattataaatgaattcaataaatattagtcaaaagttaaactttgttaggtataataaaggatcttttccattttgatagtcctgaggggtgtaattggcatttggactacagccaagaatataaacaaggaaaattttgtaaattgcagaaggattgtacaatttatctgattaaaatagaagacagatgccaagattattagctactcaatcgcacgtggtccatggttatgtaggaaataaggcagctacctttccattacagtgtctaggctgggatgtagattgttgtaacacagtccaattttcaaatcatacaggttatggtatggataaggtctttggcagcatcacaaaatcggataatcttaacaaattattgtctggattatttcaaaattttacacatgattatgaagctttactatcaggatatttaccaaatgcagattcagtgagatgcatggggcatcattacactgaatttaagaaacagaatccgaagactttatggctaatggatcctgtaatgggagatgaaggcaagttgtatgtaaatgaagatgttataccagagtacagaaatttggctctatctgaaaggggtatagtagatataataactccaaatcaatttgaattagaaatattatgtggccaaaaaattgccaattttgaacagcttaagaatgcgttacactttcttcatgaaagtataccaattattatagttacatcatgtgatcctaagctattcaatgatgaaggacacatttattgtgtcgcgtctatgagagataaagaggctagtttattccgtattccatacattgattcatactttactggggttggtgacctattttctgcattactattagatagaacttataaacttctgaatgatgagacttccactctaacatttgaagaccaaattaacgatgtattaaatgtcatccaaagggttttgctagttactaaaagtatggcaccagataatatcaagtctactataggttctattgaaacaatgaaaatgatggagttgaaaatcgttcaatgtagagatttatttgatactgtaccatgtaaaaatgctagatttggatctgttgttaaggatgaaaaattcataattaaaaaattttaatttttattttatagatgtgagtgtataaatatgggtaatactatatcgtaatgattgagttgatggtgtcttattttaattgaacaataaatgttactatacaagagaaaaaaaggtttgtttttataatattatttaatagtataaaaaatcgagaaagaaaaaagaagtatatatgtagaaattgtctcaaaatcgtctagcaatatggtgcacgtgtgtgtgtgtgtgtgtgttcattgttgatcagtccaatctaacacagctttttttaataatggtaatccctttaataaatcgtgtttactatttgcgtaaccaattcttaaagttcctggaatacctaatgtttcaccaggaacacatagaactttatatttatctgctaagtatgtagcaaatttatatccatctttcattattttcaattttaacaaacacacagtaccaccttgtggtttagcaacaaaatcaaataaatcagagttttcatgaacaaattgacttaatatttgcaaattgtctaagactaaattataattgcgtttaataataggttcagtattttgtaacgcatattgtgcgattagatcatcgatcatacttacagagatggtgttataatctcttctagaactggcacttttcaatacattatgttctttagttataatccaacctaatctgatgccagctaaggaaaatgctttggacatagatcctgttactatagctttattatataattcacaagcgcttggtggtttgattgtctcttccggtaaagaatgaaatattggtctgtatacttcgtcagaatgtaagtaaatattgttttcattgcataattgatagatttgatttaataaatcaccacatatgactgttcccaagggattatttggattattgataatgattagcttagtatttttttaatcattgatcttaaagtatcaatattaggtgcatatccatcttcttctttaagtctaagaaagtcaaccgcagcattaaacattttaggaacactgtgtaattgattgtaagttgggtggacacagattacatggtcttcaggaccaattaaagagtagtaaaccaagaaattagcagcaatagcaccattcgtgacgaggacattgtttttagaaaaatctggaccatagagtgatgcaatctgttctcttagattatcagtccccttgattgcgccataagtgagccttaaattggtgtctagcctaaacggttcgcaatggcctaattgcgctatttcattaagagacaaagaataacagcatgtttcgcctaagttgtattcaacactggtttcatatttatccataaattgttccacttcaaaatcttcttggtatggcatcttttgggttatttatatagttagtaggtgatattaatacaatcgcctatggaattgggacagttgtattcatgactgagtgaataccaatttgtcaatgagatattaactattcagctttcatctatttataatatctgagcttgcctcctcttcctctttatacttcaaatgaagtgatgatcttattatagccatttcttctcttattaattatccaaaggcagaaatgaaatatttttaagtccgtagttttagatcttgattgtacttacaaggtaattgactgcgaggtgttattctttaatcagtgatattagaaaaaagaaagaaagaaaacaaaatatgaaacgaaaaaaaatgttaaaatttaataacttgtaaattaattacaaccaatagcgataacataaaagaatttttttaataagaaaactatggaaaaattacaacaataacaattctattttatataaaagtttctatagagatcttttaaatttcatttgtttgttttattatttaaaaacaattgaaagtttaaaagttctgtttaaatgaaataaaacataatagaggaataataaaaatctatacaaaaacaaaaagtagtatatcagagtatccttattcttggaccttcactttgtgaatactgatattacttggtttgtcgtccatgaagaaatatttgaagaattgttcaacaccccaacaaccaaagaaatctaacgctaaacataacgttaatttaaatttgaaatcatctgtcattggaacgaatctcatggcttcatttaattcagggataaattctgtagagcttgccactgctaatgatgcaacacctaataacccgtagtacatgcccttattatttgtaatattctctctaaatggttcaccttggtaattgactgcaaaagtggacacttgttgaactaattgtatgataaacatacctgtatttagtaaagatggtgcaaatttcttttccaaatcaatttgaggttctcttggttctattaagtatatctctttagtgatataaaccatgattaaaatatgtacggcgaattgacttaagatagagcccataatgtaaacattgaaaatacctttttgtggtctttgtttagacagtttttgtagtggtttaccacgggaaatacttaggaaacatacagataataagataccagacacagttgcttgaccatcaccaaatttaacaccagccatataaattatagataaagagtatgcactaatcaaacaatttaatgcaagaattttatacatttgaatagtgttgattaaagcacagcgaccttgacgaataatgttagtaacagcagatacattagctaatttagaagtgaaaggagcagcgcatgaagcatcacctaattttaaggttggggcatcatcactatctcccatttcaccaacactcatcaataaagatgcaacgtctttcccagtaggcttttcttgaactgtatttgaattaatgattgtcttatcgatcggtttggaattggcttcttcaactgcttttcttaattcggcagtaataggggtacctctggcttctaaagtttttaaataatgtggatttagcggacctggaggatatagatgagcaatgggttgtggtacaggaggagctggttgattccatttttgtaaaaattgtacttgtttttcataagtgttctttagtgactctagtctacgttgctcagtgaccttctttaaaccttcctccgtaccatttaacaaagcaacaccaacgtgagcttgttttaaagcaccaacatcatttgtaccatcaccacacattaaagtcttgtaaccaagatcttttaaggtgtttaaaatgaattctttttgagaaggcgaaacacgagcataaacccaggtatgactaataatcttgtccaattgattgtgtccttgaagagcatttaatgcatggccagtaatagcaatatcgtaacggttaaagatattatcgaaatcaaatttatcatcattaacatcaaatgggatagtgactgtttcttctatattacggaataatagtcgactgtccaattcactggcactatcaagaatcaaagtcttattgtctgcaataccaacctctttagcaacatgaacagctgttaaaggattgtctccagtaatcataacacaacgatgagcagattcattcaacatcttaattgtctcaatagcatcttccttcaatgggcagtggaagattaagaaaccattgaattctaattcagtttcaacatcatcacgaggtaagtcatcgatttgggtatgagtcaacttaggtaaacttttagaagctaaagccaagactctagaaccagacctagtgaaggacttgtaaatgtcatcataattggatggtacagcagttaatctttcacggatagtttccggggcacccttaacagcggcgaaaagactaccattataagtggcaattgaagatgatcttttcaaagcagaagagaagggaaatcttctttctatgtgcaacttgcctaatttatcactaatcgtaacgtttttaaaatcgaccttccaaccaagagcttttaatgtagctttttccattggatcaccaacaatttcaccgttatctaatttgactaaagcatgagccgcaccaattactaaagaagtagtctctggtgcctcagaggcgctatacaagtgacggatatcactacttttttcagaaataccagccaatccttcaaataccaaatcttcaccagttaaagtaccggtcttatcaaagcaacaaacgtcgattctacccgccaatggaattctaaatggttctgtgcaataaacatagaattttgacaaagcagctaaggaagtgttaacagccatggttagctccattggcaattcaggtggaacaacagaggttataattaagatacaatctaagattaatttagattgaattctacccatcttagtaccttcaacccagacatatctagatgcaacaatggcaaaccctaataagaataagatgaacattaatgcttctttattatcgacagaaacacgttcagctgaataaatcatgacacgaaccaaagtaccttgagaagtctcaaaacctgtcttggtgacaatagctaaagcaccttgatctggtggtactggaataccatggtatgaagattctggaggagttacttgtaaagctttagtaccaccatgtaaaacagagattttatcgatagtatcgacttgcaatttatcctcagagggacgtagttttatagattcttttaatagaggtgtagattcaccagaaagcatagcttcattgacgatacaagaaccatccattaatatcagatcacatggaattgcactatcctctgtagttcttgtaatagagacgacgtccattggtaataattcacttgtttgtaatgtcacccatttatcatctctgaaaacattaattggatatggtttaacccccatagttctgaattcttttaaagtgctaacacgttggaatacggcagcagcttccatagagacgatcattaataaattaaataaagagtaataccaagcttcatccaaaagccatagtgcaacacaaaagatttggaagacaaataaaggtgcaacagcatgctctttaaataattcaataaaacttggaattgggatatcaaacgtattttcaccatataatcttcttaaatgaattaaatctccagaatggccattacaattttggaaatcaccaactcttgggttttcatcgattgtaaatttgggagtagagaagattttttcatcttcatttaataagaatcttttcttttggaacgagaaaaaagtttgtaaatgaccttcttctacaatcctttgaatgggaacaatgtcatcactaccattatttggagtagtctttatcaaaacgtgggtggccttatctaagtctgtaactgtgttatagttaaatttggaattgatgtttacattccatgcaggcattaaaagtattaacatgttaagtgatatgatagtacctaagtaaacaaatgtccattcggggcctttaatgtatttatcatattgtgtaaaataaatatgaatgaaagtggcataaattgggaagaacgggaaagtgtaaggtcttgctgttaaaggtttaggtgttaatagttttgatgtttccactaaaggacttcttacagacactatctcagccatgttttttcggcgtgttgtagctatctgaggaatatagttttttttttaaactcaattgagactactaaaacgttttgttatgtagaaagtttaaatgcacagtctatgtttccattaagaagtagtgtaaatcagaggtataatgtttgttttaagtgttaatggacttacgtgtcaagttgcggcgaggttttccactatctgccaaaatgtttattttcttcgttttttcgttcttttttcaaaatgtcggcggggtttttctttttttcttttttttttcttttgaattcccaaaagtgaaaaaaaaaaatacaccattttagctcatttctaagtttaaatgaattgaaattgaattattgcagaatagcgttacggtttttgagttctgtcactagggaagcaagtagctgtcctggcacaaaatacttgatagagactataatttgtatttaacttgaacagtgtactaatggtattccacgtattaagagtaacaaaaagtatgaagtttattaatcaagttattttggttgttttttttttcttgatgttttatacatgtgtatgtatgtattcatatagttagtatatgttttgtatgtgtgataatggtacattgttaataagatgtatgaatatagtggtttcattatttagtttttttttttttattaattttttaatctttaggtctgtaagttagtttttcccattgacgatatgtataaaaatttagtaatactaataaattgctaccaaaaaataaacaaacagaaggtggtactgcttccatgcattaacaagacacaaacccattatatactgcaaacattaaccccaatatatatacagctataattatccaatgcaataaaaaaataaataataataaaacatactgtaaactaataatacactttaaatcaaatcatcacaataccacctaaaaaaaaggcgataatgatttaaatatatataaatacatgcatatatatatacataaagactaaactctccaaattctgtcttctgtaaccatcagattatttctatctgccatttgtttcaaaccagcaagatattcttcctctgaaaatctttcttcttctggcaactcttcattaatcttttcaagtaatgcattcattggatatgattcatcttcaaataattctgtttgcatcaaacgagcgattataccagagataagtgataacctacttgttgaaattgaacccggttctacatcgcccattgatactgaggtattctcattatcttcatatggcaacattgccgaaggtgtgacaggttcaagagtgacattaggtatattagtacctgttctttctgccagtggattaacatttccatttagcgatgataaaatattctttctacgtcttggagacattcttaatccagcttccaacttttgccccaattcttcttcttcatctcttggtaatggaatcatattattgccttcacggtctacgtttatatcatctgagtgaccctcttcttgtaactgaccaaatgtcaattttctacgaggacttgattttgcactagacttacttggtgactttaatggtgtagctaccattgatgatgacatcgacaaagatggtgttctcaatggagtagcatttgtacttgcagattgtctcactctttgtcttttctttggggatttcttaggagaccttctggtacctgattcttcattgtcaagttcttcatcatatgttacatcattaccaatatcttcacctagtaaagcaaatcttaacaaattggctgctacctttgcatcttttttcgtgacagtttttgataatctaactttagcatgtgctgttgctaatctgattaaagtttctaatgttcttgcagtaattggtgattttttggtattttcatcatttcttaactccgcataattttgtactataacatcaactgcacttttagttaactgtggaacaactctttcctttgcatattgaatatattttcttaaaaatggaatagttactaattgtggaactttattaccattgtagttacctttatttatggccaactttgcacctccttgtaatattgggttaaatttctcgaaaacacctttatcttcatcatcatcatcattagctccatcatgaccattgataccatttaactcatcttcctcatcagtacctactgctagtgataaattcagtctttctctcactggttcaccttcaagataacctggtggtaaatatctgtgagttcttaggacatgttcactgatagacctatctctaatttcattgatatcatcagtaacaacaaacaacatgtcaaaacgagataataatgaatcaggaagagcaatgttttgatgtggatctctagtgatatcatactgtccaaatactggatttgcagcagcaataacagaacaacgtgcattcaaagtggtatgaatacctgctttagcaattgtcactgtttgttgttccatgacttcatgaatagcaactctatcagaatctgtcattttatcaaattcatcaatacatactacaccacgatcagcaagaaccattgcaccagcttccagtcttctttctccagtttctctatctgtagtgacggctgcagtcaaaccaacaccagacgaacccctacctgtagtagcaattgccaaagatgctgtgttcaaaacaaatcttaataattgggatttagcagtagatgggtcaccaaccataagaatattgatatcccctcttaaatgtgaaccgttttccaaattcttttctacaccacccataagcattaacaagatagcccttttaatatgttcatggccatagattgatggcgccaaagattgtgataaaagatcaaaaatatctttcctcttagataatttattaatttttctaatatcaaaatcagtcaacacttctttagctgaaacaccagtagaacgtgcatgtaatggatacactgcattaccgataatcaaagttctaaacccatgttgtgcctttgattcactttgattcaacccaccagcaccaagagatttaaatacaccaacaatattaactctatcccctggttttgtcctatctactaaatcatcatcaagaataacatcaacagatctaggtaattgaccggctggagccatttctggcatttcttggattgtgatacgttgatgatccatatatgtacaatacccgtactctgtggccaatttattaccatctgggtcctcagttggataaatagctggtgtaggaattcgtgttactaatgatgttgtcgcatctgtgtaatctctatagtgaaatctaccagttttttctgcataatgaacagatctaatcaactttggccttaccaatgatgttcttgtaactattccctcaatagatactaatttattcagaaattgtgaatttaaagttcttggtgtcaatgaatgagccccaaaagaacccttaaacgctaatttccagggcttatttgctgctattttatcagtgttaaaaccattctttcttataacttgagcatcttctaaagtagatgccatctcagttaaggctctttctgcaggtggaataaaataagcaggttgtgtcaaaataccaatccatgcatctctattaaactccctcaaatcgtctaatgaaatggtaattctttgcggtaatatattaaatgtagagcttgtttctttgcttttattaatcttatcattatctaaatctagatcatcatcaaaaccttcttctttatcattcaaagatacagaattattatatgcctgaattctagtaatttcctccttgtacactccataattatcgaaaaattcttggaattttcttactctatcattaaatactgcatctggtgcaaatgtattccctgcatctaattcatattgtgtatttcctaacgtagtagactccgcaaaagacatagctaaaaaaaatgccagaatgaaaaagatgcacttcagctatatcaccaaatactatattgtaacacgaatattcttttcgtacaagttgctagtgataagcaatttattgaaatagctcacctttccattttatattttagtaatgcttttatttgatatcctattggtttcgatctctaatgcaaaaaaaagaaaccatattttacaaaaaaatacatatttcaaattcataaaaaaaaatgcaaatccaaaaaaaaaaaaaatgaaaaaaaagtgcgagatcagtctgatattccccaattaggaaaagtaatttttgtttatttttttattctgttatgcaaaattgtttctgagttaatattaacctataaaagaagaataacaaccaagaagaataaaggtgagataaaaagatatatagtgatatcaatgtagttgtatctttaatattgaatccaatgatatagaatagatctatctcttatatctctccaagtgatttattattgatattatttctgagccgactattattagatactgataactataggttaattacgagtgttcatgttagagtgtccctttatgaaagacttactgtgacatatgaaatcctgatgttactacagacggtcttatgaactctttagttagtgacaatgttcttgtttttcttgtttatatacgtatatgtatatctgtacatgttactttactctttgtgtagagtataatttatacattgcatttagataacaaccggaaatcacatatcaattttagtgttctggtaataggtcttcatctattacacttacattaatggtaacagaacaacaacaaatctgcaaagaaaaaaaatatcgaacttacatagttaaaaaagaaacgacaactgcaggattcgaacctgcgcgggcaaagcccaaaagatttctaatcttacgccttaaccactcggccaagttgcccaaatctgctgttgttgtggaatagaatagttataaccatcaagattacataagatcctgaatgaatctagaaccaattagtgtattaataagccatacatgtgctacaacattagatgctgcataataaaaagattggattacataagatcttggcaaatctagaatttacctattgttttattaagtcccacgtgtattactaatcaccatgattagagaattgggatgcagttctaatccactaaattaatgtaataaattttaggattgaaccagtcagattattaatgtactaatttaatgcactaacctgaataatcgatcgagctccagaaaacatataaaaggacaacgttttctggagataaaagaccatcttccataaccgtttcttgtgaataatatatatattatatataaacataaataaaaaaacaagcaagtaacaagtcaagtaacttcgaataagtacattagctcgatataagccgcttaatatataagaccgttttagtaattatactatcgactatagttgattactgtctcgattatttggattactattaatattatttgcgcttccctggaatacacaaagaacttcaccacaccaagctacaacagctgttctctgttgtagaatagattaataacaattaccatgattaaagaattggggtgcagttctaatccactagtgcacctagattaatgtaataaaatttagggtttggatcactaagttccttaatatacaaatctgaataattgatcaagctccagaaaacatataaaaggacaacgttttctggagataaaagatcatcttccataacagttttttcgtaaattatctatatgttgtatataaacataataaaaaaaaaacaagcaataatccttaattctcctatatataacgttcttatatatttgttattgcccttactatttattcagtagtcctattaaaaaaattggtcctaagtccgaactacaacattctctaagaacaaaagagagctccaacagtttcaaatagtaagagaccaaaaagtaaatatacatacaatactcttagtaaagaaaggccttttttgatttaacgataaaagagcttagacgaacatttgttaagaaccatagaatttaattaatgaaattattactccacaaatttatatataacgatcgattattttagcaaacaaaattatacttgagactaatttatagtcataggtatttttattatacagaaggcaacaaagaatcattaattatttttttagttcctctatgtagcattttttttatagttaatattattctctttattcttttgatagtctaactatctagttttttttttcttttttttttttgaagttcaaaccacaacaatgaacatctctatctctacctatttttattttgtttaagatatttgaatctccaaccaatcatgtttctattcaaaccatcaagattgcacaactatttacatgtttgacttgtccggcagttagtttacttaaatttttgttatcactagatttaagaatctatcttcacctaattattgaaaaattttcataaaattttcattttttctgataatattggtgatgtagcacttaagtggtttgttaaattttctgctgttcgtgatttgcattctattccctattcttctttggacccataatccattacttcccaactactgcactatttatgaagtttattcatcaattcaatataattacaatgttgatgagtaacatcaaaaaaaattctaccgacataaaataaaaatatactacctgaaggactataaactaataaactagtgccacttcaattattttaaaagaataatttccttgccagtaaaaataaatgttggaatgcaaataatttaggaggttaaatatatgctcaaaaaactagaaactgttggaatttggagccttctgcgtccatggtaatggtagacatcattaagttatagatgctttttgtattgtgtactaaatatatgtatatacttattatatagtgtattcagtatacattcttttatttactttaagttttcttttaaagtttttcatttcttttcaaatcttcgaaaaacatatttggtgacaaataaaatgtcttcctgatattatggtacatccttacaccacataatatacagaaaaattaattaaacataattcttatgaaaatgacagtaataaactctcattttccaacagaaacataaaagataaataaataaatatatatatatttacaataattattcttgaccagctttataagtaaactagtcacatctgtgcattttcttaatctatatgtaatgattatagggaaattttattttatctaatttatatataacaaaatatctattagacatacaatttcaaaacactcttaatcctcaaaggataaatcagttgtttttccgtttattcatgcatgaaattcttcccatcataaagtcattaaaattgtaaaaattgggataggtacctttaatcccttattaatgactatttttctttttttactttttacttttttctttttctttttcttttttattttacatatttttctcttttaatgtataggagtataaagtaaccttacacccacgattatttatatcagcaatatgacaatgggaaacacggacgccacttcccaatcaaaaaaatatactcctttgcatttctataaataaacgcattaacaaaaaaaagagatatatatatatatgtacatatgactaaacatttaatattttattaaagatcaatgcaataaactaaatttaataaataattgtaataataatataatataattttatatatataaaaaatttaggataaagtgaggggaagaggaaaaaaaagttaaaaaaggggagaaagggttaaaagaatatgtttaaaaagacttaacttagttaccggcagattccttgaaagaaatagcagcttcttcacccatagcagcgatgatggtgaccattaagtccttaccttcatcgaaagcagcttgtaattgttcacctaattcaccctctggagccttaacatcatccttagtgtcaccatcaatggtcattaaggataagtaaccatcgtcaatgtctaataaagtgtattcagttctcttaacaactgggacttccatgttgtgagtagatggagataaatcttctaatttcttaccagtgaaaatatctaaagcaaccaagtggactttagcatgaccgtgcttaccagtcttggaagtagacatatcaacaatcttacatggtctacctttgataacgacgaaaccgttctttcttaaagcagaacattgcattgggtaagtggcagaggaaccagcatcagcaacttcgaaattgtgttcttcgtcagacatttttttatcttatatgtgtatatatatatgtggataaagggagaaaaataggatgtttggttttctaagtataaagttttctttttcagagttaatctacatactattgaattacaagtggaagtaattgagtcagctgaagcttgagatgagggcggtaagggaacccatgtgctaagattgttttacgtttatatataaaaaaaatttttttctccccttcatcgtccctttcattctcaacctcatcaatctcaatcatgtcgttgaatttttccagtataagaaaaataatggcaatagtaataggaaaaaaaacaaagaaataaacaaaggaacaaaaaaaacactttgtacaaaaaagaatgtttttttttctttttcttttttttttttttttcctttgatgaaggggtttttgaaaacaacgacgacaacaacagagaaagaaaaaaagaaaagaaaaagaaaaaaacagaaataatagaatagaaaaataatacagagaagggaaactttttttttttttttaaagtacgatattttgattttaaaaggcggaggagaggagagttgtatcggtaataaattcatcctctaaacaaatcttattttcctcgtttcttttttctttcttcgtccatgttgatagatttttttttctctctctctctctctatttatttctctttcagcatttcctgccgataaaggggagggagcggggggagaggaaaaggaaaaagggaacatggaagagaatataattctaaacgaactttgattcagtactcagcaagatctgggtgtatgggttcacgtgtgggtcctttttttcggtgtaatgagaaataatcttgtattatattattaattacaaagtgtgttggatgagaaagaaagagagagcgcaaaaagaataaaataaaataaaaaaaattaaaaaagagacaccgttaaaatgtatacatgaaatgaaagaatatcgttattcatctgtagtattcaatattattatattatcattattatcattattatcattattactattattattattattattattattcggccacttttctctgaattaaagtttgtgttgatctttttcgtttgtgcttactcttcaatcttttagtttctttcttcatctctttgttttattttattttattttttctttttttttttgactaaatctctactagaattttcaaaataaccgaatcgttaattagataaactaacgtttagataactaacgtctcttaaaataataaagtggttactaaagataacttaccatagaacaggttgacagataattctggaatttacagattggaaaaaacaaaaaaaaacaccttagaaataaataaaaaagattggtgaaaccctaacaacagggaacagtaaaacagaaaaacatctattccccactacaagccctaactattcttcaccagaaataaattccacaaatacaataaacacacatagtaaacattagtaatgattatgttgcaactagggcatcacacccatacaccctaatgcttgcaaaaagaaaaacaaaaaaaaatttttttttctttctttcttgttgttgctgttgttgccactaatttttcttcgaaataaaccgtttaacgtaggacaaaaaaaaacccaaaaaaagaaaaagagaattaattagaaataatgtagacatttgcaacaaataataatagtaacgataacgataatgatactattacaaaacaatttgaaggtacacttatcttaaaagagctttttgtgattaaatacataacatagttaaaaaaaacatcgtaaatacttatcgatctgtttttcactttttttctgaatataaaggtgaagtgtttttaaaaagaaatagagtaataaaaaaaataaaaactaataataataataatagagctgtctaaatcatgatggttaatattacattcaaagatttcaaaaaggagaagaccacactagaactagatttgtcacaaactattcaagacgttaaaacacaattatccttaactaaaaaatgcgaaccctcacaaattaaattaatcttctctgggaaagtcttacaagataataaaacattaactgatgtaggtttaaaagatggggacaatgtcatattaatgatctcgaaaaagaagcaatctataacaaccaacaacaatactattgaacagtcagcaggcacaattaaagtcactgaaccctcaacatcatccacagaaaataaagaaagtacagaaaatgcaaatgctaataccgaaacttcgactactactgagacgcaaccacaacaaccccaacaatcacaaccttctaaccaagatagcggctttgttactggattacaaagaaatgaaactgttgaaagaatcatggaaatgggttatcaaagagaagaagttgaaagagcacttagagctgcatttaacaatcctgatagagctgtagaatatttgttaatggggattcctgaacatttacaacaacgtctagtaagtccctctactacttcacaatccaataatggaaccccaaacaacgacaataataacaatgatacaaatgaagaattaccacctgatgaagaagatctttttgcacaagccagtggaactagcaccccacaagatctatctagaaatactaatacacaatctggtacagcagcagccactggtgaggcaggttctggtataccagggtctattggtttaactgtagaagatttattagcattacgacaagttatatcaggtaatcctgaagctttagcaccattattagaaaatttaagtaccagatatccacaattacgtcaacaaataatgggaaacccagaagcctttatctccatgttactggaagccgttggtgataatctacaggcaatggatgaatttaccgctccagaagctattgaaacaggtgaccatgaacttgaagcagaagggtcgttagcctctgctctcccacaattagatatcactccagaggatgaggtggccatcaacagattatgtgaattaggttttgaaaggtccttagtcatccaagtttattttgcttgtgataaaaatgaagaaattgctgccaatatgttattcagtgaatatgctgacaattaaaagtcaccaatatgtaaaagagcaggaaacaaagaataaagaaaaaaaagactaacaaaacaagtaagagagagaaacaagaaaaagaatcgtttaagatatgataaacagatataatgtatataaacacacacacatatatatatagcatataaagagagtataaaaatcaactttctaatgatatatgtgtgtattaagtacaaaaaataaagtaagacaaagtagatatcaattgtttacagcgttattatgacactctaaagttacacaatactaaaatagcgtagaactataaatgtataaggaaaatacatggatatgtttaacttacttgctctttttttccctcttatttttctttaattaaagaaaaataaaaaacaaagcatattacaaattctcaaaagtagtataatttggataatcttctttattctttactggattattaccatctcttaatgctagcccaacgttaatattacattgtttagcagcatctaattctaatggattatcacttaagaaaagtatattttcacccttttcaccaatatcttttagtatattctcatatgattttgattcaatcttaggacctgaagtattgatatcgaaataacctttaataaatggagtcaaatcaatcgactttttgttaacatcatcaaattgacatgcatatttaaataataaaatttgtgctttaactgatccacttgagtagatataaatcctattacttgggttgaagatcaattcgattgcatccttatagattggtgctttaatagatccatcaatataaccattctcccatataaagccttgcaacgactttaattttgaatccttcacatcacgagaaacaaggtccaagatatgagtctttagtacatcattatcttcaataccaaaagaatctaaaatctcatcaatttttttatcattagagagatgtctttgcgagactaattgtggaacttgggatacaaaatatggaaataatatatctttaacaaatgaaattggacaaactgtaccttcaatgtctaataagaaaactttaccaaccatactagaatgaaatgtgtgtgtcgcaacgttaagtcaacttttttttataagtctttattgaattgcttatttcctaataattaatctcgtatttcaaaagtagttactatatcatctttgttcttatggtagttttgctatcatgattattactttttttttctttttgagattgttgttaagagtaggaatccaaacaaaaaaaaaagagcaatgtaattttttttatatgaaattcctttggtatttccaaaaaaggaaatgaataatatttcacaaatatacttttttgcaataaagagtatctgaaaaataaacaaacaaataaagtatactttcagtctaatggcatcatcatatgtgggttagaataacaaaaatcaaataaaatcaacaaatatacttacaattttattcaatcttatctaaaataccttcaaatactcattctagaatatagttaagctatatttagcggaacattactgtgccaaattgcattatccacacaactgatatattttgctattttttctctaccacctactcttccattccagtaagatctttaaaagtcgtgagttatcatgactatattatatttgtctacttgcaatcacaaatggtttaaatgtgacatccttttagacttcttatttttattacaatttacaatgtcttcgttacataaacgaattgctttcttatacttcttacttaaatagcttttaactaaagtatactgttttcctgtagcttttaaaaattccgtctctatcttactcttgcaacttttttttaaatgcaaaacctaacaaatgtataaagaagacgaatttactataaggaatagaaacaatagtactttaatgttaaattaccatttgctttttgtaaacctccaatatagataactagagctcacaaagagtgtgattcaatcttttttcaagttaagtatattctctccttctaatttatattgattaattataataactttacattcttctaatcatctgtttcatgtgtttctgtttgtaaaaaaaagaaaagttatttagtttaaactttgtctctgttttatcagaaaaagtaaagaaatatcttacattagaactatatgtagaaataaaaaatggtatttttaaatcatataaaagaataaacgctttccaaaacgttattaactttaatctaagagtaaaaaaccacgtatttgggacgaggggatgaattagacttattcatttaaaactttttcatgtgcaatgtaacttaaaacttctaaacataattataaaatgttaaactcaatttataaaaaatacactggctgaagatacaaatatttttgcaaatatttgtattgataaatacataacttaaaatgttaattgctaattttttatattttttcgacaatattctactcgaaaactatattaaacaggctatatggcgcgtaaagatgcattgtgtaaaatctcttagggtttatcccaaatgaaaatttgaataacatcgactttttccagtagaaaacaagtagtgttatttctatattttttttatatagctggatttaaagtttttcatttttcttgatatcaaaaaaaaaaaggataaaaaattaacatagaaaacatccttacatcattaacacatctatgtgttcgattcctcttcatgacattttttctttctatacttcaaacacacacaagcagtcttaattatttttttgtataacatctccggggtttgcgggtattacggataaaagcacacaataagaaaaaagggaaacaaaggaaaatttctacccacgtctttgcttcttttttttttccttctccttttttctctctccccctccttgaatcgccaccattactaaaaagagatgagacaaaacaaactattagaatgtgttgtgtcgattgagccagtaagaattgatttctactaccggaaatactatttttgtttttttattactaatatgttcaacttgatcgaatcctcatcctcatcttcatcctcattctagttattattattgttgtgcacaaactacgataatagtggaaccccctatgtttgtccaatggcgtatttgcttgtgttatgtcatcgacacatggaaaggagagaacttcatgtgatttaactttgataactatattataacttactaattgtctgagcataaaatttatatatcggtcaaaccttgtgtttgttccttgagatgtaaaaacacacacacacacacatatatatatatgtgtgtgtatacatatgcatatgttggtcatcatcctccaacctttcagcgtaagtctggattaccttgtataaatcttcaccattttccgctttcaagtgtttatcgtttcttccttgcccctcctaagcgataaaactaaacagatcataacagagattattgctaatctacgtatctaatacacaacaaacaaaaacaaaaacaaaaacttcataaccattaacatatataattaaactattaaaatggctaaagacaaaggatcctctggtgttccatctgaaaagaaaggtgctactcttttcaagactagatgtttacaatgtcataccatcgaggaaggtggtccacacaaagttggtccaaacttacatggtatctttggcagacgttctggtcaggctccaggttattcatacaccgatgctaacattaagaagaacgttctttgggacgaaaacaacatgtccgaatacttacttaacccaaagaaatacattccaggtaccaagatggcttttgctggtttaaagaaggaaaaggacagagcagacttaatcgcttatatgaaaaaggctgcctctgagtaggtgcttgatataaacccacattctctctaaaagagtaaaagaagaaaaaaaaatagaaataaatgaagagaaacaatgtacaaaaggaaccaaagggacaaaatacaaaagaaagtgattttcatgtgtaagaaaaattccaaatttatttattgttaattgttaatagaataaaaggaaaaaaaaataaataatagaaaatgacatgatgtaagattttatcactttaatttttccgcgtgacatttttattttatttcattttattttgtttatttgttgcttcatttcatgttaggttgtaaatattaagttgtcttatttatttgtttatctatttatttatatatcttattacgtattcatccatcataatatatattcatcgaaattcctagagtagtctctattcctaattttcttttttattcttagtcggtaccaattacatgagggttgacgcctggcctattaatagaaattttgattaatttataagaggaatatctatttcaatagtaactataatgttctagaatctaatatacatatgacaaagtaatagaaggtatagataatttggtatctaatgttcgtaaaaaaaaagtttacaccagcaatatatttaaaaggaatgttattataattgtgaaataaggttctttattaatgctaccgtagttaccagatagtgtctttttatttactgtactactaaatgtctcattaattaagagtgcctctgtcacatatgtcacttgaatactcgtagcgactttactcgtggtagatgtatatgttgtagattctttcgtggttggaccagaattgtcggtacttctactttttttattttcactcttcgactttctactaaaagatgaagaagtagaagaagaagaactactgtaaactcctgcatttggatcatcaccactagcttccaatgaccccaaatatgttcttttattcacaatagcaacatcttcctgtaaatatctatggtggttggtatatacatatgcagtcgtaccattttgtgtaattccactgggaactttaccacatgtaatattaacttctttcaaaatagcataataatagcccgggtctgtaagatcaggtgcattccaatcaatttcacccccagcccatgcaatggtacctttaggattagtcgagttaccacctggccaaattgagatatcaatcttagctggagtctgtgggaattgataaataccagtagtactattatatgtctcattcttatataaaattctaccaacaacaccatccactgaccattttatgtagtcttcgtgccaatcaatttcataggtatgatagtcatcgaatgtattagtggtagaaatattaaaactgttagtataatttaaaacaccattccaatagaagttcgtctgtgttgtgtttaactccgaaccaacccattcaaaatcaatttcatcttgaacattggaatacagaataaatgcagtgactacacctgctaaatgtgatgtttttaatttagcactaaccttcccataccagatatcacgtgtagaagctaataaagtaccaccggagtattttggcatagctaagattaaagcatcttcttcttcataatccataatataacctgagtaagtccaatctgcctcactcgtgttacccagatatgtgtctgcattaacaatcttagacctataattgctgaaaacggtattaacatctttgcagataggttctggcatgcatgagttcaaagaataggaatatcttggatcacagttgcccaaacagtatgtgcctgtaccacatacacccgctcgagaacaacatggatacttttcaggacacgaaatcgtagaattacaatgataaacttcggtagccaaaatttgattaagcagcaccaggagaagagtagagatatgtaagatggaagtcatcttgttaggaccctagaaagcaaaatgaagcaaaacaaaacgaggcaggacagaacagaactatcaacgctagtttcaaccgttaaacaggcaaagccgtaacgtaaagactacagcatgttcctgctttcattacatcgaccttattcatccttctctttttatatctctatacaccagctcttctcctcgagaaagaaatatgagatctcttgtaagggctttgcagatttctttttttattttttttattctcgagtctcttacccatttaggacaaaatatttcacaacttttcgcgaatgcttggttctgttattcgctatttttctgttttagataaaacaataaagatactctccaattcaggaaactgtgggctatttttatgattaaactgttttcaaaggtatccatcactactgatccagtaacacctcaaactgcaataagttacaatttgttttatttttatttaactgtttctgattgcaaatgtatctattgtgacttggtttaaaaaaagaatatatagtaaaggaggtatataaaacaacaaaaacagaaagaaaaattacacaaaaggcctattattcacacacacacatattgctattttttcaaaatggcttggcatctgcattactgaaccttcgagcattgttgtctatcgtctatatctgattcctcactagaacattcttcttcactgtttagtggtctaccgtatgccagtaaattagctcttctttcttctatatattcttcttcactactctcggaattatgcacctctgtggcaaaaatttctctattcttacgtgaaaggatatgagtgaatgatttttgtttttctctgatattccaattcatggttctactaataccatcaatgaactctgttggtgaggattctattgtggggaaaacatacggacttgcacatatagtgatataatcacccttcttcaattctaccctatttttaccatcaaacgccacccaggccgtacttcttgatttcgatgggactctaactttcaatttcatcgaatcaggcaaaacaattggtctgaaactcaatgtgtggggacaaatgggcgttactgcaatagcattaactgatggataaattaaagaacctccagcacttaaggaataggcagtagaacctgtaggtgtagcaataatcaaaccatctgcttgagcaacagtcattagtgaatcatctccatacaattctaacatagatatatacggacttggacctctatcaatggcaacttcgtttaatacatgatgttcagccacacattccatataacacaattttttccctgtgataggatccttttttgttgtgtgtcgacggtaaacattacattttagtctcattcttaaatttgttttaaccttttgattcaatattaagggtaattcttgtttaaaattttcaaaatcgaaatttgttaaaaatcctaatgaacccaaggcgtatgataacattggcggcacatgcttttgaaatagagtggaagcaaatagcactgtaccatcacctcccaatgttatacaaagatcaaagaaaagatcatgttcctcaatgaattgtttattccaatagccaattttagctaaagtacagaatgaatcggtacagatttcctttccggcaaataattcagaatcctcaaagatgtcttgaacatatattgtcatttgttgataattggtcaataaccatgcgaccaattctcttaataaaataattaaagaaacttcattcttcttcactataatgataactttttccacttctaagttaatctttgtattagagatatccttactcaacattcttacatcatatgcagtgttagcaaatgccacatgactcttacttgtttttaatggatgatcactgcttgctgtcgatatttttcgtaaattttccttagcagaatttaggtcggcaagattcttaacatatttcatataactttcatcatccgtctcttccacagcgatctcattattatcattgtcatcattattatcatcattgtcaatagtatgagcagcagcagcagcagtagtggcagtagtaatagttgcactagtagcaacactagtattattactgtgagattgtgataaaacagggagacatttgcttgttttatttttgtcgaatttgaacttgtctaatctatcaatcaaaccattggtgcgcgttataggagacgcatttttataagaagaagaaaaagtttcacctatcttagtgttaacattaccatcattataatcactattcaataaactagatacagaattagtttgtgtaacccctgccatttctgatggactgatcattctaatgccgttacctttccttttcctttttttctttaaagaaactacttaaacgtataagagaaaacacaccacaacaaaacaatatttaactgtaacaacaacaattctaattgtactaaaaaatgttattatccttgcaaatcaactggttgttgccaatatatacaacctaatgtaatacaagggttaaaataaaaaaaaaacacaattctaatttccctttttacaatagtaattcactatgatggcctttcaatggttggttctaaaggaactaaagacaaatcaataaaaattgatcaaagaactacagattacacacacacatagaaatagaagcacatgcacatatatatatctatatatatgtatatatacagaagtacaaggtgcaatataaccttggacaaaaaaagagcaaattctcatcgtgtgactcgtttttttctttgtaaatgcacttcctcctttaagcaattcactctctcccccagtaacaatttgttactcttcagtcacccaaaaatggcacaaccaaaaaaattaaaaacaaaaaacgacaaacgaaaaataaaaaaaaaagaaaagaaaaactaaaagccagacattatcacacccatacatccactaatacactgttttagtatcccacagttttttttctttcttttttttttccatttttcacaaattgctcttcccgaatgaaaaaagtgaaaaaaagtatacagtcggccgaagtttccctttttagttatagtatacacacacacgtacatacatacatattatatatatatatagataatacatacgtatataataaaaagacatttagagggttatagatacatgaccattcacacataaattattgatctatctccatctatggagaaatattcactttgatcctattccacatttatttttgctttcaaatttaaagttgtgttaatttacatttccagttatttccatctaataagggtaaggatgcaccaagacaccaaccaagttcattattgttaatcattctggcggtttttaattctctatgaagtggaatgtcataacctgtgtgtaataatgatacttggaaggataaatcttgacaaaaatgtgggtcgttctttaattcttctaatgatccattaatgttttggaacacactttcccaggtctcttcaccgttacacaccattcttgatagatcatacaattcatccaatgtgaaacttaatggcatgcctaatggatgtgttctgtcatagaaatatgaaaagatatacaaatcgtttgtctctttaaacgtatgaactaatgatggttgatgcacaccattaaaggaacatggtggttgggtacacattgcatccttattcaaaattcgatctgctaaatatctacattgtgcaccagctgccactttgggaccttcaaagattactgtataaattgttccgtcattcaacttcactttctcctttggtgcagttatgtttggtggtaaacatgggcttataagtgtgtaaatgttagtaaaatcgttcttcttaatcaatccgttctttatcgcagtctccacaagcacagaattaatcttatttctaccttccattaatccataaccaagatgagagaattgatacaatacatattcatatccaccaaaatttaattcatatttgtgttcaccttcaatcattctttcatttggagagaaacttggttcgaaaacaatctgtgtagatccaccaccaagatcaaacacagcactggttggcaatttcttaccacttccaatgttccctagtaaataattggttgtaatccatgcatagacaccttcctgttcaccactcataatagatataccatccccatcaaccactgcaaatggataatccttctctaaatgatcttttacagcttgtaaaatcttgttacttttaacttcacctaacaatctcaaacctgctgtagctttgacagctattggtgtacatgatcttttattctttggaacaacatccatggcaatatttaacaatggatctaaggaacttgcagcaccaattgcatccgtgtcaaatgatgatagacctggttttagcatttcaaaagtttcgttaattaaagtaggtggttgtgtacaaacatcaaattcatagacatgaacacgagaaccagtagaaccagcatcaatcattaccacgtactgatgccccttatcacatgcaatatttgagctggaactagaaaaaacagatgattcagcgctctcaatttgttgttttacagcagatgataattctggattcttcgaatcagcctttggatcctcaatataacccggtgtatcctgaataggtaagatagaaacttgtgcactttccacatctggtggatttgccggacggttaatagtagacgctacgtttcttgcaatatcaagattcgactgaccaacatttgatacccttatcaataagaataacataatggcaccaacagcacctattataaaacgatagttactaaataaccgtggcatgtttgcttactttagttgatggatggtggtataaacaaaattatgaaacatttacttgaaaataacaaaaacaaagacaagaagttacacaacttcaaacaataactagttgtatgtatgttaaattaaattttggtatactgaatatcatctcttaatttcttttatttaaactattttttctttaaaaatatttttttatttttgttcttttttttgcataacgtaaatacataaaaatataaatataaaatttaattattcagaagcgcgtcttaaaaaaatactctatttaattaccaaagacagtatattatatactaattacatgaattattatatgtaatctgataatatggaaaaggaaaaaataaagacaatttaatatttcttatggcgtaaataaatatataggatatgaacagtgaggggtgcactctgccattgacaattttatcactgcaaaaacatattatgaagtatttcttttgttataaaaaaatatttcagaagtatcttcaaacgtttgttacaataaataattggtaaaccgtagaaaaaatcaatttattttttcaaatgtattatgctctaatttatttaaaaaattataaataatttcagtagtctatacatttatatttacaccaatcttattgtattaacaattatgaagttaacaatcatgaatgattatcatgagtacgaagcttaaagatatcattcatcgtaggtctagataaaagccttgacatcttacgtcctgatccagtagatgatgaattagattgattagtagcttcatttttattaccactggaatctctatgttctgatttattgtttataggactttcttgtgatgatgtactgataactttactctttaatgataatctattagtccatattgaaatgttactactgtcacttttattccttttatgtctaggggacgtatgctcatcagttactggtattcctttctcattattattaagtcctgtaggctcatcaggatctacgttttttgttggtgaattgtgatgccacaaaaaattaaatgatggggaatggaaaagtcctgtagatggggatttcaatttttcttccaaattattggttttcccagctactggcagatcattaacgtgaacggttgtattgggtgtttgttgtgaaggatgtgttccaaagactatattctgatgataaccattggaaacagataatggctcattagagaattgaatattttgtggtgtggatgacaaaagatttgaattacgtggtgttaaagattgagaaaatgcattattactattattattactgaataatgaagttagattattagatgcagtctgcggccccatagaactcgtaggtggcctataaaaacctgcagattcagagagtctcaatgaaagtgaatcactggcaaaaggtgatatgttcacttgttcatttaatgtcccagccaataaactttgtgagggctgtccaggcgcaatcataaatggagatttagacaatggggttgcaaattcacgagtatgtgatgtaattggagtttgaatattattttctggatttgtaagtgaatctagttttttatcagataccgtatgaattttcatggaatttgcagccgatgaattaatatttaaattcttttgagatgtccaataattatctaattggtctgttgtgaaaccctttgaataattactaacttcgtctggataatcattttcattatatatcatatcttgtaaaccagtaataaaatgatttgcattatcataatcaaaagactgatctaaaccatcttcctcatgttgagttatatgattatgaagtttttctttacaagaatccgtattagcactagtagtggaacttacatttggaattgaccacgttgagtaattttgctgaagacttaattgattatgagcactagcagtaatatttgccattgctgtagtcgtagtagtagtggttgttggaatgctaataggaaaagttgataaaggattgtgaatttcatcctttcttaaactttgtggagtattttgactttgaagtaaagacccttgccttgatattgacgatgtgatatggtgtgcattttgctgatgtaatgaagtttgtgtattttgtaactgggcagttgcattacctgggtttgaatttgaagtagatagatttatgaaagagttagaatcggtgttagatagttgttgaccagaattaaagtgtgttaactctggcggcataaaattaatttgctgtcgaagattttgactatcacttaattcactttgatagggttgagtcaataacctagcccttaactgtttattttgcacattcatttcgttatatttttcttctagaaagttaattttatgtactaactcttgttttattttcatccaatattcataattttgtaggtcaatatctaattgttcttttatcagtctcactaattgattatcttcattaagtgtagacaaatactcttccccttgtggtgataatattcctgtatcttttgaaacacacatgttaatttttttaatcatgttcaaaattttaattgtttcatctgaattattcacaggttgatattttgatgaatcattacctatgttattactattatcgttagctactaaagcattgttttttaaagatgacagatttgtagaggacgaggatttttttaaaatattcaattctttattcatcttatctagcttatctacttcagattgcatatctacaattttagtctccaaatttttaattgccttattcaatttctcattcactatattatatttaatttgaaggttatcagtgttaagattattttgctcgatttcttcccatttaacaatatctgatttcattcttgataatttttctcttgatttaacaattttctgatttaatttttcagctttcatatcacctaacagtttgttattttctagcgatttaatatttgatttcaaagattttctaaaatccaattcatgtgaccaatgactttttaaattatctaattctaagagtaattcttctttggattctttgaactcttgcaaataagaagttctttgattcaacacctcatgcaaatcttcttgagcacatattaaaatcttctttaaatccccaatcgaataagtttctaaatcctttaagcttgttaaatttgcatatgatggtgtcaaatcatcctgtatattagacacaagattcatactgtccatagaattcattactgtgtcattatctaaatccttatcatcattattactatcccttggaactaaaatattagtgaaggttgatgatgaaacggtattttttctccattttctatttttaataatctcaacatccttattatcagaaatatgaccatcagaaactttttcagatttagtcataataaagatggaaggtaatctacttataaagcccatattattaactgtaataaaatccaattggtattgggtagatggatttaaatttgttaaagaacaacatgtatataaggattgtgagcggttagggaaaacacctaattgtaaactattgacataaacaatgtaatgagtaatgaaatcccttttaacatcttgatctaaatcttggttaagtaaaggctcattctcccaatggattgtaatcgaatttgttgatattttatctattgaaactttagtagctggtggagttttaatatttaaatcttgaacgatattttctactggaattttcagaaaattatataatctggaaaataaccataacaaggctgctaaaacaaccagaccttgtaacataatgtattacagcaatcttacaaaaaatgctgaaatttcctgattatctgacgtattgtcttgcctttttcgttttctttacctctttttttccagttaattatatgtagttgcacaacaaaagttgtaaaaaatagtcaattcaattgattacaggcttatgactaatatttttgtagatgtacttcatatatatatatatagaaagagtgatagatatataagatgtacaaatcttaatcaagcatcaattgcaaatgactgccagtgatttctcactttctttttgagaatttttgttttttaatttttaatttttttttctttttcattttctcttttagtgaaaatcaaaacgcaacagacttcaaattacaaaatttccgaatttactagttatttaatcaaatagaatttagcctttacgtagtcttagtttactctattacacgtattaaccctatttattttattatcatatttttgaaacttgttgaaccaacatgagctacaatattactttccaaagacaagttaatgcataatagttacatacacacacacacacatatatatatatatattagagtgattgagtataaaagaggagttagttataaccatttccattttcgcaccttttaatattcttttaaatttactttaatacaaagttagcacctcttaattttaagtactcttggtctgtacctggcgccattggttttacaatcaattgatagatttcagaattatgatatctgatgttatttgttggtgatgtatatggtccattcaaccctgttatatcacagtattttttaggtggtttcatagatggtggtgcatttatattgaagtatgttacttttggtactaatctcttgcaagtttcctgcgtattttcttccgaaacagaagcttctagcaaaccattgattcttttctgttcatctgatattaattgtcttgcggctttattccttctatttactttttttttaatttgatgtttctgggatttgtatggagatggtgaatcaattacatttgctgtggcaatagatcttaaatactctaatcttgcctcactcgacattttttttatttgtattcctttcttcgcctcttaaaacgtcttcttctaacgatcagtagttttaattttctacaacatcaagttataaaaatatgtttattcatcacaagttatgctaagccaagtacacaggttatgatagaagagtctgcatcaataatgtttttttctctttatttctttttttaagacaatcttacctttgtacatgtgtttccttttcctctagtaattaaaaaataaaataaaataaaagaaaagaaaagaaaagaaaaaaaaacagatagagctgaatattagtagtttacaagaaaacgaaacaaaaaaaaatcaaaaccaaagatgtatgaaaaatgaagaagcctctttcaatgagaaacatgatggtagttttgaaagtttcgcagaatattagggacacatatgttgccaactaggaggtcagaaaaatttcaattcgcgagacgttttggccattatgacataatatatacggtaatatgattctaaataatcattgatattcacttctttttttagtagtgtagatgtgtttaatacaaaatgtatagttttcgtctccaaaaaaacacaagattgcttactggatactagattcgtaaacaaggtatatcagttttgatttaaacattattagtaatcggccatacttctcaaggaggaatttactgctcttcaactgagtgagcagttgatagaaaggaagcttagcaaacaaaaacaaaaaacgaaaaaaaaagaagacctaacacactaccatttatgtgagagaaaatttacagaatttttttgtcttttttaaacttaacagtttatttcataacgaaagaaactatgcacataagaagaaaacaagaaaaaaaaaaataagtgatcgtacaaatttaggggtgtcgccctatttctttttatggaagcttcctgagatagaacggcaccattacttttttcggaagttgccgtgaattacggtattgttatattgctgcattattttatttgtagcatttttctctttgtttttacgggaacaagccggcaatttcctaaattgttaagagcctaaggtgagagtttaattgctttaaatattcaaaaccttcacatttttggagacatttacaaggtaaaacgtgagcccagattagggtagacaaaagttttgcagtagagatgtatctcctttactaatttaaacaccatactttcaacagtaagtcttaactaccttttattgccaggtatgcacctttttttttccaaatcggaatcatacttacgacaatggatttatatctcctgaaaatagggttgacaactaatcggtcccgtccttacttataaaaacttagggtttaatgggaaaatattaaattaaccaaaggaattactcatctttcctttttttttaaaggaaagctttcttattattccgcctagatttttcccgctttttttttttgtgctcgagaaaattttcattttttccccaatttttaatgcttgttttgccttattattttttttttttttcagagggcattccagcgatgaaaagaacataaaaaaaagacaaaaaaaaaaaagtaatcgacaaaagaaatgacaaaataaacaaaataaacaaaagacgtattgaaattcaaaaagaacaaagaagaaagaaaagaaaaaattaaaaaaaaaaaaagaaaaagcacaacaagaaaatattagtaaaacaaaatgattcaattctattactaaaaaatgagaatttcacctaagaaaaattcataaacttggaaaaaaaaaaaacatactgttaagagcgtgatgagataggaaaaagaaatatataaagtataaaacgtgtataaaaattttgaacgaaggaatttcttgctaactcctgtgctcttcattcttgtcttgctacgcgtactttggctttgctcaaagatataacgctcattttgaagttgttttggaatatatatctatatctatacatatatatctccccatagtgaatcaagtcaagtaataatcacaaatcacaactctaataacattaacataggacaaatgaccgacatggaattaccaccagaatatatctctgctgcaaatgatttgcgttctgataccttcaccactccaacaccacaaatggtacaagctgccttaactgcttccattggtgatgccgtctacggtgaagatgtagatactgctaaattagaacaatacgtggcaaaactagccggtaaagaagcaggtttattctgtgtttctggtactctatcaaaccaaatcgctttgagaactcatttatatcaacctccatattctatcttgtgtgattacagagctcatatctacactcatgaagccgctggtctagcaattttatcccaggccatggttgttccagttatcccagccaatggtgattatttaactttggaagatattaaagctcgctatatcccagatgacggtgatatccatggtgccccaactaaagttatctccttagaaaataccttgcatggtattgtctatccattagatgaattgattagaataaaggcatggtgtatggaaaacggtttgaaattacactgtgatggtgccagaatctggaatgcctctgttcaagccggtgttccaatgaagcaatacggtgaaatcttcgactccatctccatttgtttatctaagtctattggtgccccaatgggttctatcttggtcggttccttgaaattcatcaagaaggccaaccacttcagaaaacaacaaggtggtggtgttagacaatctggtatgatggcaagaatggctatggttgctattgaagacaactggaaggacagattattaagatctcatgctctagcacacaacttagctaagtactgtaacgaaattggtgttccattggaatctccagctgacaccaactttgtctttattgatttaagaaaggcaaaaatggatccagatgttttagtcaagaaaggtttaaaatataacgttaagttaatgggtggtagaatttctttccactaccaagttagtgatgacactttagaaagagtcaagcaagccatctttgaagctaatgaatacgctaagttacatccatgtgatcaaaatggtccaactcaagtgtacagatctgcttctaccgaaattgatgttcatgggaacgtcattcaagaagttaagaaatacaaatattgagtcaagtctcttcctttttgatagattaaattttgtatttccctatcattaatgtctttgttaccatctgtttaaatatattagtggcattgtcgatattctttaattaaaactttctttacttttcaaacgggttattaattctattttttttttattttgtctcattttaattttttttaatgctaattttaatgttgttcttttgcattatttcttcatttgtttactgcaacacatttgattattatttgctggtttatcaaatacgtttgagaatcaatggggggtaaacgtgtgtatttacgaaatgcatagatacatgatttactcatcaccctattaaggagggacgaaggtgatcagccagggaagagatcttgagaaattccagtttgcaaggtagactcatataatttttaactcaactctcttcttcctttagtgtcttgatcgaccgatatgtttgatttttttgtggcatgatagactataccccattttttattaaagaggaagcaagatgaaaaaaagaataggtgagggaaattattatttcctctttacattttctcttttaagtattcatgatcattatatagttatatatatacatatatatattattgaatcgagtgagatgtatctcctctcttgctcacaacgtatatagttaatagaaatggctgatagaaaatattaattggtttgttgaacgtattagtcatgattttttattattgtgcgtggttgcactttgttgccgtggcaacgggtgcggggccatatattttttcccgtttctttttcttgcttcgtttgttatgttttaaagtttcacttctctgttactgtcgagcgtttagtaacaagagcaattatatatatacatgtacattcataagcgaattagttctttggtactaacctgattcactatttagtaacttctatcttgtatactcttaaaattgaactagatataccaacaaaatactatgtctgatcctgttgccattattggctctggtttagccggtttatctgctgctaatcaattagtcagagattatgagattcctgttttcattcttgataaaaactcttcaatgggtggtaattctataaaagcttcttctggtatcaatggtgctcatactgctacccaagaacaattaaaagttcaagatactcctgaattattcttcaatgataccaaaaaatcagccaaagaaaggggttctgaggcattgatggaaaagttggctcaagactcgcacttagctattgaatggttacaaaaggattttgatatcaaattagatcttttggctcaattaggtggtcattcagtagcaagaacacatagatcctcaggcaagttaccacctggatttgaaattgtatctaaattatctggtaatttaaagacccttgctgaggaaaaaccagatttagtaaagattcaattaagtagtaaagtagtcgatgttaaattaaatgaccaaaatgaggtggaaggtgttgaatatgtggatgaagaagacaaccatcatatccttaaaaccagaaatgtaatcttttgctctggtggattttccttctccaaagaaatgttagctaagtatgcaccagagaccgttggtttacctaccactaatggtgcccaaacaaccggtgacggtcaaagaattcttgaaaagttaggtgctgaattgatcgatatggaccaagttcaagtgcacccaactgggtttattgatccaaatgaccgcaatgctggtcataaatttttagctgctgaagctttaagaggattaggtggtattttattaaacccggctactggtaaaagatttgtcaatgaattagcaacgagagatgtcgtaactgcctctatccaaacagaatgcccaagggagaataacactgcatttttggttcttggcgaaggtatctatgaagtactaaagaataacatagacttctatatgtggaaacaacttatcaaaaaggttactattgaggaggctgttgaacaatataaattcccaatcacagctgatgaattagtcgctgacataaatagatacattactaacgagaaagatgattttggtcgttctttagtagttaagaattttggtgaaaatatttctaaggacactaatatatttattggtgaaataactccagtggtgcatttcaccatgggtggtgctagaataaatacaaaggctgaagttgttggtaaaaatggaaatgttttagctaagggtttatacgctgctggcgaagtgtctggtggtgtccatggggccaacagattgggtggttcaagtttgttagagtgtgttgtatttggtagaactgctgccgacagtattgctcttgttaataatgtctctaaaattgagaagttgtgaacattattaaattagttatattttttctcttcatttgcttctggtgtcatttactaatttagttattatggtgtttatattacttaaaaattattaatatatattgttcttatacactcaattttcagctacatagagaattatatattttaattatgtacttttgttgttcttttgatactttgatgcaattagagttaattaaataaatcacataccagaaaattatgtaaaaacaaaatgatgtaaaataacaactcaaaaaaaaaatacaatacaaatctatataccacaatatcccaacaaaactacataagtatatatgtgtaacaatagtggttgtgggattgtttgataattaatgtttctgttaaactaatttaatactacagtaaagacttgaacaaaccaacttcgcagttgacttaatacttaaaaagataacaaaaaagatatcaaaagaagcaataaaatgggaaacctcaaaccactttttatctctttaatagatgagacaaacacacctatattaatccatgtcatgtcttatgaagctaaggatgttaataaaattctaaaatataacacgttttctaatatatccttagatttttttgaaagtagtttgtttcaatgggatcaaatatcaataaattataaaaatggtaattcaccaatacgaatgctatttgaagttgagaatgttacagtatttggaatgtggatgaaaccatctggattaaaaattatagttggttttaatgcatcggacaactttgaaaatgaaaatgactctttaataatatttgtgtttgagaagattaagaagatatatatgagagttaagtcaaatccgttttttgatttaggtcaagctagtacagataagaacaatattgttaagtttgaagagaaatttgaacaggaatttggaacagaagtacaactgtaatttgagagtgaaaatgcctgaacacttctaagaatttttctacgcatatagaatatgagaaattatcatcaaatagaatgaacaatattgaaatgctattattaatattaattacactatatattagatacatatagtatatcataaaatatgcatattcttacaattaatttttgctgttttggatcgatgcatactcttctgtataataatctttatatttcggtggttggtttatcctctctaaatttctaaaagtcggaatacctggaacttgattctttaaaatcttggatggatattcaattaatgtatttttaatttggggtctatcaattaatataccagggtgcccattctctttatattccgaggatctataccattcatttgaaaatactttcttcaatctacctggtgtccatttaggtttattaattttaaactgagagtaaaacaatgagtcaacatattgaactttatcatttttatcctcatgctgtctaaaatcgattgcatttgaatttaacagataaaaagtccggtagtcttctaaaatatcattagtaacatcaattgggagatatatttcagtatctaaatcatttatgaatttattaagtctaacaaaatttttattagctttttcgaacttataataagttagccaaaatggaacagaatttttaatagatggcatcttactgaaaaaattaaaatattttcttgtctgaacattatttttaactacaagccatgtcattttaattaattcgactacaataatagctaaattcccttcacacaataaatgctctaaagtattacttggagattttgaggctataaaatttgttatagcagtatctaaatatttaacatagtctgtctgtttgcttagtataaatttggaagagtctgatagttttgattggaattgggaacactttaagatcggtaaatattctgataggatataacaactagtggatgtttcattacaataatagaacattaaattcgatgaaagatctgaaaaagtattaaataaaaaggaatctttttctttattattttgtatctcaatttttaaataacgtaaaaaattgaatctaagttctctcttatccattggtaataaatttattccaaatttgtataaatcaacgatatcacgctttgaattatgacctttaaaccaattaatatatttaatccaaagacgttcaataaaacaacagggtattaaacatctttcaaagattgactgtatcaatcgaggtgttttattagattgtgtaacaaaagttgtatattgatcccaattattaacctcgtcttcagctaatggagtcaaattaaaaaaattttgctttatcttactttcatatctccatatttcacctactataacctgattacttttaacttttgactgtaaaattttaatatcttttacatcctttaacaactgtttataaggtttcacatattttgcgtattggtgtaaaggtatttgtataatctcttcatatattggttttaaatcagtcccttgcttatgttcaaaagtgatatataaatcccaaaacacatgggcatagaattgccaaccaaccagttgtttagctttttgaaatgaagatcgtattttttctgtatcatttggataattagctattaagacttttaaataatcacaccataattctaaacattgtgggaatttactgacagatgtagcaagaatgttgactgatcgctctaatccatatagctgatattcgatagctgtcatttttttccaataaccaaataaaaatggatattttgaaacaaataggcgaggtatctctgttaagacctcttttatatcatcatttggagttggatatttttgtataagtttatcaatatcctgtaaaactaaatttaatgtattaatatcgttccatttcacattattacaagctgttataaagtctggattatcttgaataaatgaattgtccaatttttttacgatatttttaatattagactggtcaatcattattatttaggtatatatgttgttaacactactctaataaggtctactgagtattaaaaatatcttctttatcctctttatcatagcatacccacgtttactgtgtattgttaacaaaaaaatatgtttacatcttaatctgctacatactcacttttaagagctagttagtagatatttcgcttattttcatttttcgtcttaatttttttcttttttgcaagatgagatgacacaaatgccaaaaaaacttgttaagacagtctttcaaaaaagcatattcttaaaacgaccttcttacatttcatataaaataaaggtagaccttttgaatattcatccattcaaattgtatttatgtaaataaatgcctacatgctataaatgagggctaatagtggaataccattataaactaattttttgttaattattatgaatattacatattattccttgcttcatttttgtttcaaaaaatattaaaattgaaatgatggaaatataaggtataaacttttaaacaaaaatttattataagttagttagtaaatgctggagagcatgttatttctactcgtgattgattttttttattttaattttttttttttgctatgttatataaaggtgtgcgatttctatgttactctctaatgagttcattaaactattttacctagtgaaaatcatattaactcaatggcagagaaagtgatggggcatttaaaagatatattcaaattattgttttttaactgtgatacagaaggttggaatcactcacagagtctttacaaatttgatgatttagatttatccttgtatgcaaaaaaaaagtataaaaaaagatttcaatatctcatttttatttggggattaacaatattgaaatcaataatgatcatctctgatatttacacctgtatcaaattattggcatttaacatatggtcaaataactgtgtagaaccatatgtctcatttattataacaaaatggttatttagtgtctgtattttaatttctcttttcttagttgtcattgacacagtgaatggatatcaaatatacaaaactagaataatctcgttgtgttttattaacaactggtcaagaaatattttctcacttcgcagttatgctatgttctgtttgtttgataaaattaccccaagtgggtttcaacaaaaactaacatttttaacgtattttgaattgaagaattgttcaaaattactacttgttgatacaccaagacaaattataaatggattaactctgtggagtgtcttgttgaccaagaatgagaagaataagaacttgaaagattttcaatcattgattggaatatggaataaagtaaaatggattgttaggaataaccatgaagaggcaatgatattaagttttatgctattgtcctttttaatttggttaatatttatcactaaattttggatagccgtattagccttctttagagtttatcacgttgttgtaaaaagacaaaaatttaatgggttgaaagaatatatttgtttgacaataagttataatatagattatttaactgaaaagtataaatataaaaggttttattcaacgatgtctctacttgaaacgaataagaatgttgttgaagatttttatgaaaccgatagtcctttcttaacagatagtgaagatatttcatgttctatttatgaaaatgtcatggaaaagacactcttaggaagtgatcttagtagaatgatctttgtaaagacaccagattcgctaaatacattgccaagttattattatcatggtaatctggaccaaaaagaatgaaacaaacaaacaaataaaataaataaggtaataaataaaacgacaagaatacaaatgaatcaaatacatatatacatagatatatacatgcatgtgtatataatacaagttattaatgttgttggatcatagttcatttctttacagctcatatataaagagatataagtaaaaaaaaaaaaaaaaagaaaaaagaagaaaggaaatcttgaaacaatattctagtgttaaagtgataagcattataatggcaacaaaaatttcatacaaggttaataggagagaagaaaaaagagagatatgaagacaattagcgaatcttattcgtttttcttcttggacgcagtatcttcagttgctttcactttagcaagatcgtcatcaattctagattgctcaattgagatttcttttctttttcttaccaattcctttagtttatcacttggttcgtataagccaaatctcctaaaccgttgtactagttcgttcattaatccaatatcaccattagcattttcaacttctgcttttaagacattctccaattcaatgaaatattcttcagataagataaatttccctgattttgtgatttctttgaaagtggaaccggtgaatctttcgtttaatggggattggaaaccttcacctttatttaaagaaataccgggtttagctgcaattttcaataggcctgctttgtatagaggcacagtcccaccatatttcttgaccatatagctatggaaattctgttgatattggtcataggaggccctatttgaaccgatccagccaagtctttttaaagtgatcttcatgtcgttagatctattagcaaggtcgaaatttcttagtttgaacaatttaattggattgaaagtcagtgggttgattacacctaatctggtgaaaagcacaatgatggcaatcttcaggacatgcaagaagaaaaatgtccattgtgctggaacagatgagtaattgacttgaatttcttctcttagtttagaacccatttgatggttaccgaaatagtcttctattatagggatcaacaaccttgacagttggttggttaagcagataccaggtgttggcgaaatgcagtctggtaagtctgtatacagccataataatagagttgcgccgatgatacctaccgaagtggtattatagtcccattgtggaacaatcagttgaccaggccataattgctcgaataagggtttatcctcgtccaaaggctccaaatattgtttatcagcggcgtcgtagtggaacagtaaacaaccaccttctgtcagataacctggatgtgtggatttacaataggaggttggttcatagttatgaaaaatggttggtcttgttactatgatatcagagagtgtgaatttgatgttcggatctttaaattgggacacatttgaattaaaaatatgtttaattttcgtgcttatcgtgtcatcctttgagatttgaaaagcatagtcgcgatcgccatcgtcacataatcgaacgtaaacttccatgttttttgctgttttatttttttattttcttttatattttattattatatggaaagtttgattgttaattaaaggtggggtaaagaaaagaagagggttagagctgtttcaacagaccagtgtggcaaaggacaaaacaaaagaaaggaaaaacaagacacaattgtgatttttatataacaattatttctttttgttgtagttatttctatgatgattgcgatggggggattgagataacttgattatgtaatactatatgcatatgaatatggtttacatttttataagaaagttgaccagctgtgtgtaaaaaataagtagcgaaaaaaaaaagcacacacacacacgctcacaaacaaagaaatttgaaataaaaaaaaaactactatttgaaatggcacgtgcaaaaaaaaatagaaacgaaaccaaaatcgaaaacaaaaaagaaaaaaaaaaaaaagagagagagagagaatttccgattgcttccattcaaaataataggctctgcacagtggctgtggtgtggggatgttttaggacgtatatgtgctttccttccgtctttccccccctttttttttttctctttttgtttttgtctctctccctctctgttttttcccgccgtggcaaaatgccatcatcaccagcttcttcccactttacgcagggagaaagggaaaaagagttttctttctgctgttacgtatgtgatgaacttctcattgcagttgttgttgcagttgcagttgctgtcgttgttattagaaagacttgatctgacaggactaatcaacctgtaaatgtttatactacctttattctataactagattaatggttttacttatgaatatcatcaagaccaaatgcaatctgggcggttaacaaaaactataaaaatagttgaaatttattgttcttctttttggcaattcttgtcctccccttatttttttttttcttttttgttattttttctttgtgttttattctgttcgatgtcatcttattttgttttattttattttatttatttatttttttttggagattttgatagcgacacttctctctctagtttattataagaaaaataaagtaaaatgtaaaaagtatcttaaaaaattaaaaacaaaggacacatcaatagatagatacatacatacatagatcgagaatagtagttatatattagttaatattgtattagatttgtaaaaatataacagtaagaaaaagacaaatagatttttgtataataggtatacatacatacacaaaggcaatagatattcattttaaagacaatttaaaacgtatttctttgatttgtggatctcgattattttattatcatcctttcttctccttttctttttttatcatacaaagtttttaaatagaggtattggtaaagcaaaaggaataaaaagataaaaaaatacagatgttgatacaagaaactgatttgttcttatataatttgactttgaagaaacaatctaattataattattcctgtctaggtactttcgttaatatagatcccatatcaaatgtctcaaaacataatttacaattatgtctagccacagagagccatatcgaattgtatgacttatcaaatagaacattgaccaagattggtaatgatatacccttatttgccatcatcaaaaatattaagactgttaaaaaccaaacaactagcatagactatttgataattacctcagattcgggcaatttatcgatcctagaatttgtctggaaccaacaaactctctctttatctctatccacactgtgtatagaacctatagcaagatccggtattagaagattgtctccaatggattatatcgcagttgataaacatagtaggtgtttaatgttatctgctgttgaaaagtttaaatattgttatcttctaaattgtaataatactactaataataatgttgtcatatctaataccaatacaaatactaataataatatagtatcttctcctttggaagctatacggtctaattttatcaccttggatttagtgtcatgtgatatgaactacatagataatccatgttttgcagctttagagatggaaattgtattaaataatagcaacaacaacaacaataataataatagtttacctaacaaaaacctttttcatttggtattttatatgttggatatgaatttgaactgtataattaaaaaagcagattatttactgcctgggaagccaagtattttgatccccttacctgatttagcagaatatggaatgttgactaatattgttgggagtcaatataatcagagcaataatcataacgatacaacaaacccatttgttatggtgggtttagaggattcgttccttgttaaggacttaaaaggtgatttcaacatcaaagttcaattgcctaaatgtcaagaccatcactatcctgccacaataacatcccatgtgtttcgttcttttaagaaacaaattttcattttgttgcagactaactatggtgacttgttaaaattacaaattattccaaatcaaaatgagaaaaataagccaaaattcatcttgagctattttgatacaatcccggtggccgaacaattacatattactacaaatgggttgcttttcgcaaattgtgagttcaataataattatttgtttcagtttgaaagtcttgggtcaaataaagaggagaagacttttacagtttcaaaaattttacagaatttaagcatattaaagaaaatgtccacatctaaccccatgttttctgcaaatgtggttaagaactcttctaatcaagctgtagttcctttcaaactgatatctcgccatgaagattcctcaatcagggtatataataacagtgttgttgttgagacacttgtatcctctaatttaccaccaaaccccaaaaatatatggaccataaagaagaggttagatgatgatgtccattcatacgttgctcttgcatttcataattatacagttcttttaaatatatcaggtgaatcaatgcagacattgtccttttcaaatccagtaccttttatcatgaaaaatgataccaccatatatatgaccattttaaaccctaatataattattcaggtttgtgctaatcaatttgttcaagtagtgacaacagaagatacttcagagtttaaacaaatccatgaatggttcccacctgcaggtatacagatcattactgctactgctacttttacacaattaattgttgctctatcaaataatactgtagtatattttgaacttaacatagttaataactctctaatggaatcatctaagactttagtctttgacaataaaatcgctaagattgcaatggatcaaaataaattcagatctagtgatttgattgttgctacagatgatgatcagttgattaacattatttgtctagatacaaagagtcccaattttatggaaattttagctttccagcaattgaatgatgaggtaaatgatattattgtaaataacaatatgttttatgtcggactaaaaaatggtatatatgtaaagtcgaaatttgatgaaaaggatcgcaacattatacatacagcacaaagattcatgggtgcaaagccagtttctctttctgttgttaaagacattcttttaacacccaaagatgatgatatggggtctgattctgaagaggaggaagagaattttgatgaggaaaacaatttacaaaaggagtcaaatgtcgaggatagggaatataatcaaaatgaattcagtacatgtattactattcattcagacaatgtatggttagattataattttaagcaaatgaattatattagacctgtaacattgacggataacatgtcatctttaaagcgaataactcaattttctacctcaacaatttcaagaaatagtgtttgtgcattatcttcatcaggctcactagttattggaagatttaaagattttattcatgttgaccattggtttaatatagtagatgcaaaaattaagaactcgatatcaaatattacagaagaggaagatgaagagcaagataatggtgataatgaaagtgaagaagtttattttggggaatacctgaataaaaaacttatttttactgacgatggagaacacattatatcaattgataatcataaagatccatttgttcaaaattgccgtattagcattatcaaattttcttcaaatcagtgtcttctcaatacttcctcaaattcagattattacaatattgaaggacatcgatgtgttgcagcacaacttattcactttacaaaaaataaaaattttgttaatttagttatatccactagagatcagtatttgttgacgttccaattaaagatagaggataccaaaaaagtttctcaatatgaactatcgttattacataagacaaaggtggaaagtgatatatttgctatgggtataattaatgataaactgttcgtcaccattttaaattattgtgttctttatgatttaggtaaaaagcaactattaaaaaaatctattacgaaagtatcagctagtatgcactgtacaacagccattgatgtatgggacaatagtagaatagcagtaggtgatattcatgagtcagtaactatttatcagtacgacctgcagagtaatcagttgtatcctattgctgacgatactgttaaaaggcatgttactactttaaagttcattgattcacaaactgtggttggtggagataaatttggtaatttatggactttaagaattccaaaagaaattgaccaaaatagaattatgaattatggaaattctttgcataatagcgtcatggaagcaccatataaactagaattgaaagatcattatttcatcaatgatattcctatgtggtgttcagttgttgactttttacagatttccgatagaccgtgtattttgtatggttgtttacaaggtactattggtatacttttaccattattgtcgaaattacaaattaagacagcaagtaaattacaagaaagcatatccaatttggaatcacttattttaaatgatagagtgtcaagattaactatgcaagacgatgatatcgaagataccaaaatcaatgaggaggaaggtatttggattagtcaaaaagaacaactagattctcatccagaggagtatattagtttagttgatagagatcattttaggtataggagttattatgcacctgttaaaaacattattgatggtgatctatgtgaacgattcttaactttaacatcatatgagcagacattagtttgtaaaaatatggggaaacaggtaatgatagaggatgttattaattttctgaatgaaactagaagcaattatatgtaggcattctatataatttgtattatttgtggtaatgtttttgaaaataatattacgatattgtttctctaaataattagtatagagtgcgtgtaatattaattagaggttaagcattgactagtaaaaaaggagaggcgttgttaatatgttgatagaggtactgtaatgataccagttaaatttctttattctgatatgttttgaataatatgaacatataatatatatgaatgtgcaaaattacgaatcatataatagttgaaacaatatgtgtatttaagtattattcttttcctaatgaatggataatatgtcttcaggctttataaagggaaatacaaaaaatgaagaattaacatgtgttaaaatagaaaatggtctgttgcaaaataattctaaattacatctataagataaattcctatcaattgatttcaattcgaaaattacatatatctaacaagattttctatatgagatgtttagagagtatgcgtctttattacaactatataatgcagaaatgaaaaataaaaaaatagaagcaaaaaaataatgaatcattaaattatttgaattggggtattattaattataataattattaaaaagggttattaaatatgaataagaacgataatacaattacaaaaagaatgtttacatgggatcggataacataataaataatgtacaactaacaaagggagggattgaagtggaggtaatttaattcaaaaaaggaatatagaaagagctaacagatgaatctaatggaataactcttatactgaatcatcctcagaggcatcatctttcatatgttgtttgtgttttcttacagtaaagaattttattcctttatgcggattttgttctatagagccttgatttggggtgggtagttgaatagaagcagtcaaagctggactagcactaggtattagttgttcttgattagcattttcttctagatatggcacatttaaattattatcattattgtatgatgggttcgcaggtacaggagatggagatagaacagagtatggttcaagaggttcaggaactggtaaagaatccttctttctatggaaaaatccaccaatttctggatcatcattgattagtggagaattgtaggaattattttttttggccttccaccaccagcagatagttaaacacatatcaatgaaagctacgactaaagacgcccacgcaattcctaatagtggggcacctacattagcttttctatcagcatcatggaaggcatttctggccaatactgagactgcagtttgtaatacaacagctaccatattgaaaatgcatccaacgatagataaaatcatcacaacttgtaaaatgaatctagaacagaaagttaaaatatataataagaaggcaacaccaataaatgctaaagcgatccaaaagaaacagaaggagaatctagataaatagtagtacgtgtctctatcagaaataaacttaaagggaacattaactttagtatcaaaattgtctagtggagaaattggtgcagcgggtgataaatgttcaccacattcagttataccattggatatggagcaagcaccccaaaaggtccatcttgttgtatttgcagcatttggaattccggaagtatcaccttgaacccagtacaatctatctattgggtaattagtcatggaccctgataagatgataagaattaatagtaaggtattacctgctaggaaaagcaaggtgaagcatcttaaaaatatcttggtgaataatgccatatttttttatttttttcttgtacgtgaattgtgtttctattactatacttattagatggactatatcaggaattgtgttgtcattgattctaggataagaaaactacagaactgatatacaaaatgttactatgtatgagtgatataaaaaaaatcaagaaaaatatgtaagggaaagaaaagatgtaaataaacaggaggaaagagaggaaagagaggaagaagaaatttgttgcaaaagcggtaaacccatggtatggcagaagttgcagtttcgcaatgagccgttagagaaagacgatagggttattaaagaaggagtttgctgaagtgtcgtctctcatagtataatacaaaaataaatgtctctatgattccccccccccccccaagccttgagcaacatagatttcgaaagaacgtaaaatatttttaccatttattgttttttgtgtttgtttgtttgtttataaataaaaaaaggctgaagacaatagaaaagtttgtgaatcttgcaggaaaatgcccacacactattacctaaacaagtaacagtatctccagatcaggaaactttcaaatatttcagagtaacgatgcgattctcttcattaggagattttcagtaagggtagcctgttttttttccaaaacggttagataaataattttttttgtgttcgaacgtcctcatacgcatatatttctcttaatattcgtatctggtgatcgaaggtgtgacttctttcttttttttattttttttttcgtttttttcttttttagaaataaaatttttttttcatttttttctactatgaggtagaaatagcacacatattaaaaataaaaaaaaaataagaatttttctcttaaatgcaagcaattagatcagtcatacttatcacttgatgtattatagtttttaaagtgtgttgtaaagttcatatagcttgaaaaattgatgctaatatctcataagtaggaagcaattggatataaggctatagggaagttagcaacagcatatattttaaaatatatatacgtttattatccaagacataataattatttcagataataacaataataagttcaattcagttatgatttcacaccaacaaacacaaactttaaaaagagcatgttcccattttgaactggaatcaccatttccagaaacccttaaaaggaaaaaatattcacaccaaataaatcaaaataatatattggattctactggtagaccaatatcaccaatttcgtctatatatatggaaaataaagtatgtcaactgaaacaaaatccgatggaagaacaatatcgatatcaaaatagaaatgacgataattacagtaatagtcataataataggaatattttttccagaaattttatgactccaatacccacaccgttaaatcaaacaagatacataaatcatataaacaatatatataatgcaaactcagaaccatattgtgaggttgaagaatatatggccaaaggttatgaaagcatggaatataattctcataatattcaacttcataacggcagtggtagtaataacaatgaaaacaaaaacagccataataataatatggcatcaatgcaatacagtctttatgatttgacacaagaagaactagatatgatgataatggatgatgctacactaacaaatatcaatgcagtttgctgagaaggaaaataggcataacaaatagattaaataagataattctaataaatatttaatgtcctttaatgaactaacttacaatttttgattctatttatgatttttttttgtttataaaaaattttgaacatataaatatggatatacatatagacgtagatatatagacgggtgggtgcatgtgtttttatccatatgtagatataataaatatatatatttgcatagagtgtatagataccatactgtatttttttaggaattgtgtattattagtatgagggaactatttgttgtagtaataattacgattattatgaaattcttaaagagtgcacaattgcggcagaattacctatttaggtaatagaggcgctttcactccaaaaatggaaataaagcatttaaaagggcttggagacggaaaaatttcttctgaattttgtatttttgttttgtctttgttttcttgttcttttgttatttttttggatttttaggttttttgtcgttcatacgtgagtattttttagatctccgactatgataaggaagaattctatagatatatatattggagggtggaataatgagcacaaaaaataagtcacaaacgattgttctcttcttaaacttattcttattataatatatgggaattttcctattatggttatagagtaagattgttattgtaaaacaaaaatattattaaaaaatacaagatgcaatcacatgtatactctgtaaacaaggatgatttaatattaatcgttttaagtatatttataccaccagtcgcggtaattattagaaagggtttcttctcaagagattttcttttaaacttattgttatttttaatctttttctttcccgccattattcatgccttttatgttatttatgagacatcaactcaaagaccatataataataccaatggctcatctaccacagtatccatttctaatgtagttgcaactgaagatcaattgccattggcatctaatgttgatgggttaaacaatggtaatttcaacattgatttagaacgtgatggtaataagggagatttaccaaattatgaagaagttgcaggccataaacatgtaacagataacaagattcaacattgattatttattatatatgtataatgtacacaatttatttaagtattatatgacattcgtgatggttttggatagtttgtagttaatgggttactctactattttgaattgattctgttttgtttcctttctcaagtatagatttaagtaataaaataacatataaaaaaggaggtttctactttaataatagagtagtattcctttccctttatgccaatatttatttgtttaggagaatacttctgtagttgataaaaacgacaacatttgtaatataaaaaagtaaagtaaagaaataggatttatgctaaaaaaaattgtcaataggtgtctacgtttccaaatactacttatttcctgagggtatggattagctatcatttgcgaaatctcaaacgatacagtatctccgtttaggtattactgtatgaatctgtctgtattttattttataatttttattttttgctattcttttttggcataattatagacaataatgttaagtatctacttacgtaacgatagtttaggattctgttcttatttttctaatctgtattacttgagttatattctttacatatagtaatatattgatgggttagaaagacttacaggggtacaccgattgtatgtttctataaagtatttgagacacaaaaaactagaagaaaataaaaataaaaaatatatattataaataaaattattaaggtagtattcaaatccataaaataattatttttggactttatgttatctattattatcctgttaacgttaactcaaaaattttttcttttcatttctttagtgatttattttttatttgaaacgtttagagataatattaatttttgtatggagattttatttccctatcaaattggatcttatagaatcatgtttaaagaagtgtattcaacaataattgaaaaaaataatatagtatttaaatagaaagagttaccgatactataaaaaacaaaagaaaataaatatcaataacggataaatgatgagcaatataaggatagactccattacaaacattcagtaaattatctatcgttttctgtctttcataatattttattggtattaatatttgagatattgatatgtttaaattctgattattggtttgggaagataatagttacagtatttctctaaactcttctttttagcatattttacaaacaaaacttattaatggaaatataaagaagttataagaaaaagatgctaatataaaaagcaaaggtaacgaacaaaagataagaaaatgaataaccaagaataaactagacaattaatcatacaataaatattacttaattctatcagtgtagatacattagtattacatctcaagatatagaatgaacctatatcatatatctatctatgtgaattattgttgacatttgcgacatatgaaatcctgatgtcaatataaatgatcttatgaactctttagttgacgacgacgttcttatttttcttgtttctcttgtttataaaagtttgtttatctgtatatctgtgtatgctagtttactcctcatgtagggtataatttatgcaacatgtatagacaattaatcaagaaatatttacttattttagcattctagaagcctatatttctcataataggtgttcatttactacaatatatttcaaaaatgttataatgtgacaatcttatggtgatatgtttctgataacagttaatcttgttgaaattacaataatacttcacttggatagatataagatatagactctttctatatctctaaatgtaaaattcctatatatctatatatctatatccctaatctaagataacctaatactatacacttatatactatatatctaaacttatgttatccttggtttcctgttcgttgtttttcgttgttggttgctctcttgtgcttatgttggttactcctgtttttatctatgtttgtaaaatttgcaaaaaggaaagtttagaaaaatatcgtcaaccctcatttttctaaacaaaccctaaacagttatatcagggatattacaattacaaaaattactaaaaaaatctcccggggtgagtcgaacacccgatctcaagattactactaaaattacagtcttgcgccttaaaccaacttggctaccgagagcacaaccctcgttatgtgttgtagatcaaccttgatattatgattataaaaatattgttagggttttgtgatgattgtcaagaaaagttctagtttggatttataggacttagggtttgttggtaaatcccacatgattgttgaatactatgtaacaaaatgaaacattcatgaaacattaaatagctaattaaggagaaatgtatctacggtgacagtcgttacagaacctcaaataagaaactatcaacccatagttcatatataaaggaccagtatcttggtatctaaatttatatgtttggttgatttataaatatgtagcacattgtataatacaaaaaagaacaagcaataatcgtttaattctcctagatatatataacgttcttatatatttgttattgcccttactattcgttcaatagtactgttaaaaaaaaaaaaaaaaattggtcctaagtccaaactataacattatgttatgcagtggtaagattctttgtgtattccaggaaaacgcaaataatattaatagtaatccaaataatcgagacagtaatcaactatagtcgatagtataattactaaaacggtcttatatattgagcggcttatatcgagctaatatatttattcgaagttacttgacttgttacctgcttgttaatctcttttgttatacatgatatacaaattatttacaagaaacggttatggaaggtggttctttaatttcagaaaacgttgtccttttatatgttttctggagctcgatcgattattcagattggtacattaatgatctgactgattcaaaccctaaaatttattacattaatttaggcgcactagtggattagaactgcactccaattctctaatcatgatgatcagtaatacacgtgggacttattgaaacaataggtaaattctagatttgttaaaatcttatgtaatctaatctctttattatgcagcatctaatgttgtagtacatgtatggcttattaagacaataaatagttctagattcattcaggatcttgtgtaatcttgatggttataattattctattccacaacaactcctgctgtataataaagaggtaacatcatcgagattacgtaagattctatctgaatctaaagttatctattgtgttttaagtacaacgtgtccatttgccacctattttgtacagcgtgttcacacatttctgttactgcgccaccataacctattgtcctaaatgttctataatcctcaattatattattgtaactaataataataatatgcgttggaatttggagcgctcagcgtccatggtaatggtagacatcattaagttatagatgcttattttatttttgtactaagtacatgtatatacttattatatagtgtatacagtatgcattcttgaatttactataaatctttttttagagttttcatttcttttcacatctgtgaaaaacatatttggtgaaaaataaaatgtcttcctgatattatggtacatccgtacaccacataatatacagaaatactaattaaaaataattcttatgaaaatgacagtaataaactctcattttccaacaatgatcatatcagtaattttatcttttttctggtgttttttattttattccattaatatactctttcgatatacaaaaagtttttattgaggaagaataaatttgttgtcaataaaatagttgtagtatataagcaataagttaccagcaatctgatttgtcgaattggatacatgagtctgtttattagtagttatttttggaactttattgcttaaaatgaaacgaataagaaatatagagaaaaaatatttagattataaaagaagattttacggtatatatttctagtcctgctatacgtacttaaattgtttcttttttctacaaggcctattttaaatggtcgtcaattaattttgtatgacaatgcgaaacaagaaggaaaggaaagaaacgatacataattattatcaatttactatatattaaatacttttcttatttaacatagatcagatgaatgctaactttcacttcattttgacgacctttcattaaaaaagaattgagaagtaaaataattagcatgagatattatggtttgtcatttttccaagaatcattgttattaatcttttcctttggtaaagaaagtcagccttatatctgtaagtcttatccaattttgttgcagttgaagcaagtaactcatggtcagtaagcatcttcaaaccatgctcttctagaagcttttcataattttcaacatctttgatttgttggtcaaattcagggcgtgctacaagtagattaataatatcaaaacacactaatactaattctgacccctcttctagagaagatattcttcttagttcctttcttattatcaaataatatgtaaaaacgcgttctggatttttttcgagtaaatactttactatcagtaaaaatctatatttgcatggttcatctgataaaggaagactaaatagttttgcactttgatagaaggctactgctgaaatacacgaatgtccagatatccagtcggccaaacatagtggaattttattttggctatctagctttatcagtttttcattcatatttacttcttgtagtatattttgaaattcttcgggggaagataatatgtaaagaaggtataaatacaccaagtagtggtttttatttaaatttaaggaatattctttaaaggaattcttaaaaagtaatttcaagcagaaaggggttgttcccttcataaccggaatcgataaacctctaatgatataaaaagatattatatgggggaaattggcatatgtccattcaatatttaaaccttgatctatctcgtccaggagattcttggcaaactttctttctgtgagtaagattgatggaaggctcatcttttcacaactttcaaagtgtatcgaatataatttttttaaacaattggtaacaaatatcaaagcaccttcaaacacaacaggatgaggagatccaataagtgaagtggcaagccaaaacatttctttcataataggtaatgttggatcaatgccttccaccaatttagccagagcgaaggtatgtgcgatatttaaaaacatggtttcttcgtttattttaggaatagcaaaaatttgcattgattcagataacagatctcgacaaagtgcttctgagcagctttttttactcatgacacctaatatcatcatggctcttgcagataagaatgatttatagttaaaaattgcatccagaatatatttcttaaattttgttttccagaatgatgcttctgtttttgaactgaactccatcaaaagaataatattagaagtgaatgtttccagagaatttactttgcttgtaaatgatgtagtattaagaagtggggtccatctacctttttcttgactaaaacctgagattaaatttagcttttggtgtgaaaaggctgtggagattgataataaatgttctctatcgtcattgtccaaagattcgttaactgttaaagaatggcatatattcattaaaagtttatgtagcgttaatcttaaaccagatggaccagtatctattagtaaagatatcacataaaggagttctggtaaatacatttgagttagtaatgatgattcaaaaaataaaggaatggaaatattagataggatatttaattctgaccagctatggttgtatgattctagggttagtgatggtagcagtatcttgataacattcataaatctatgaaggacttggcttgtcacttcaacagtaggaaagcctgttaatagggtaattacttgattccattcacgattctcagagtctctctctagtgcatgattaattacttcatctacaaccaatgcagctaagtttacatccattgtaaatttgtaccaaatttgatgcatgtatacagcagtgaaatctgattctttaaatgtgagacggatcaaaccttggataatatgagaaaaaacttcaggaccagttgggtcactaaaattaaaaaacgaatcatacatatttggtatccaatatgataaacaagttaccacagtaggaatagccttatggttaactacccccttctctaatccaccaacaatatatttccaaatatagggagttagttcaggagaactagtacataaagattgggtaataagagagagaaacattgtagtatcttgcggaacataaacttccaaggaatgataaaacacagtaccaaaattaagatgaaatgcattttgtgttgaaactaacaaattatacgaaatattcttaatggattcatcatcactgaataaaccaaccaatattactaaacaaagatgggcaacgatttcatctctattagttttattcttatttcttttctcgatcatttctgagttgattacagtataatcattatcgactttggattctgcgtaatagaacattttgataatttctagatacttagcattagaaaaaattaaccgattaccatcaaaaaaacttactgtaaattcattttgacggccagtaacatttgacacatttactacagaaatatcgattaaattaaaaacatcatttaatagcactgatattgatttatttaaattgtggatttcataaacttttggtacttcatgtaatatttggaaatctttataaccaatttttagggtaactggaaagaatttatgtatttcttcatcataaagctcaatatcatgcaatgatatgcgtgtattctcaagactttgtagcagatcagatgttaatcccaaacctttaataattaattgatctgtagatgtattcaaaaattcatacggaatattagatgtcataaatggattctgcctaactcttagctgagtccatattttcataaaaatatctgttgtattaatatagtataccttaatgcaggttttaaaaacaatgtctggtagtaaagaaaaaagaatagtgcatatttttttgaattcgttttgttttgttgaaaagtttgtacaatctagaacaagacaatgcttatttgaccaaaccttagtataagcacgaagaatcttgtatattgaatcttctaggctctccatgttgattgctagttgtctacaagatattattaatattggtacaccagaggaagacatagattcctgtataggtgaatattgttcaacgacattatgaactgaggacttaaaagcatgtcttttcataaattcataaagttgtggatatttttccatgttttcttttacaaatggaggtaaatcatgtgataactctagcattggaaggcctaatttttttaacacaccatcgataacgttggcaaaatcttttagtgcttcaaaattctgtgaaaaatggacatcattcacagctttcgctctgatttcaagttcatgttcatataaaaacttatggataaaatggtaatcaaaatatattgaagttggtaagttcttttcaggtactttaaaaacttcatctgtatcacatagattttttatgaatccactgattctatcattatatatctttaaagtcttggcatggggttgaagtgcaggccattttgtgaaatcgtcagaaccattggccatattttgtataactttggcaagtataaggaaagattttttacattcgtaatcaaaagatatttcaatattctcagagtcaggagacactaatgcaggacctaaaaatcgcagaaaaacaaatgagccaatagacaaatatgcataatggggaaatttattcttcatttctctatatatagtttgaaatattagtcttaattcagagggaaagtaggaaatagatgaaacaatggcattagttaatttatcgaggtatgataaaaaagtttaacagatttttcaatatctatttcctgtgtaggtttatctatatcaaagtaatcctttttgttaattagctcttgaagtgttggacgcagagttctaatcaaataactgttacccttagctcttgcataaagggagagtgctcttgtcgcacaactatttcttcttaggacatccaaatactttgttgcattatgtatttctgacgtgattaactgcaatacaacaatatgacctgcattcatcgtttcaaaggcattgattacaccaactgcgtatgcgtctatctcagcagatggacagacaagactacctaaataaacaaatttaggatacttgagaagaattgtagttaattcagacacagccttctgttgtgctgatttggaggaactttcctgaaatggataattattggtaatatcactgaaaacttttaggaaagcaatcttaatatttttatctttagaataacccattggtagtgtaaattgaaaactggaatcaacatttgcaattgacaggttggttaaggcagttattaaattactgtttaataaactaatcttgtgttttaatgcagccggatatttgtcaagattagtacttttttctaaacctttcagtagaattgtaaagtagttaccaaacacaacactagcagatcgtttcatttcttcttttgtattagcaaatgacacttctaatgggacatcttttgttagatatgcaagagccttggatgattcaattgaggtatcgatatataatatatccaaatcccgttttttaagatccatatctctatgagatttagatatgttttcaaaatcatagtttttattaagtgtttcttcaaaccatgatatcactaatttgatccacttattttttagagcaaaatggctcttgatgcatagaaattcttctgagtattcgagactgttaaacatttttgacatttgaattatagctttgtaatatctaatcgacttatgatcaattttttgaacaatttttacgatatcagttatggaatttatcaactgcaaagaataccagataatgatttggttatcgtcatctcttttcagtattgttctaattataataatcatttgttctaataaaatatatgataattcctgatctggtaaagttagatcgatggtacttaattcatcgattttgaccttaatgtttttgaaaagtattccgtatgaaaggggatgtaattctatacttaaaagatctttagcaatctctcttatgagcaactctgagtcatttaaccagatacattgcaactttataaagtaatcaattttttctgtaatgtcttttctcatttcatctaaataagggaatttcttaaatccaattaaagcttcagggcttgttgttaagaaaacaccagatatggcagctaaaatgcctgcaatatttttaaaatcatttaattgtttttgagttaaaacttttaattttgagtagcctaaccatttgttgtatagtgcgttcatagcctctaagataacagaatctgggaactttatatactttacaatgttattttttagtcttctctgaaatgcaacagagcctgaagcagtaaaatcatctgttgctatagttttaataaaatctatattgtagaggtatacactattgatttttccaacgtattttctgtagaattttaaaccattataataataagaatatgcatctttgagaagattggcaaagtcgtttgtattgcaaaatagtgatgtgaaaaggcctgcacctagagttgttgcaacaatggggaaaactgaggtctctattttaatgatactgcttgacttctttgattttgcagtaattttccttaattttgccttgatgcttaaaaattttatgataatttttaatattgctaatctttttggattgtcaacatgtctatcaaatagtgctgcagaaaataaggtaatggtataactgcttaaaacataaaattcatttatttgatcttcctgtgcatcttcacatgcttcttcaatataattggttaatacatccataaatgactgagctgaatgttgtagtacaatattcttatccataacaccaacaaatataggtttgatgatatttttaaattccttagaagtccaacaggctgcatctatgtctttagaaggaagtatgaagtaatttgttactcttttaaatatactgaaaattatcatcattaaagtccgtgcataatcattatcagcatcctttatgtgttctaaggataaagaagatagctgaccaaggtatgaactattattactatgtactgattgtaggctttgtagattattaagtgggatagcttttgctaatgtttcactggatgattttctagaaggtgcttttgttgatgaagacacagattggatattctgtcttgaagataatagtttttttgtgacattagaaaaagtcaatttgtgagtagagacagaattagacggacttctagtggatattcttgatggatttgatgttgatttatcggaaggtaacgataatggaatatgttttttagtttgtactgtgtgaggttttaaagaagttgaattttgatcagtagtgttcatattgattgtttttgaaatattatctttgttttgatttttatttgaatttggatctgattttttgatttcatgaaaatttgttagtaatattgactctacatcccatgaactatttaatgttttattatcttgatatgaaacagttttactatttgaggagatagtggatgacgcatcagaattgttatattcagatggggttccttcagtagatacattaacagttgataaagttctagtcttttcaaacttatctaaaattgagccatctagaattgagattattatatcagtcacggattcatcaaaatatggaaattcctttagtaataaatcagctgttttataaaataaggttttgaaaaatttcgatacattctttgctacttgttttgttatcggttgttgctcaagtaagtgaaaaaatattctaaaaccttcaacataaattgataatttttctaaatccaaaaaatttaattctttatctaaatgtagatgttttaaaaattcgtccggttctaactgtaatgcacacacaaaatattccagttgtaattttttcttcattgtcggatgtctgtcaaggcaatgtatcaggaatttatttggcatggtgttccaatctttacctacacttaaattggtacccataacagcatatagtctttttgcaaattgaatacaaggtaattttgaattatacattgatatggaagatgccatagttagtattgtcaaaattgtgcttattgaatcaatgagagatgaatcacaagcaagttgtacaccatttatatttttcaatattaaaatcaaaaacttaatctgtttagattttttagaagaggatgttaatgaggtaaatctttttagattatatgttaaatgtttaatactttgtgttcgatcttcatataatgtgggactcatagaattacctcttttcttattagtaggactacttaaatggttattattaggagtagtagggaaattactagtactagaggtgtaattaatggaattattatctttgagatcacttgaaagtacagttgcatcccgcagatgtttaaatttcatactattaatctccacaaatacttcagtatcaaggaaaagaagcatagataaaaactgtagaattgattgatatgatattaagttaatatcactaaaatttgtgtataattccaaaacatttaccaaagaatgtgatgtagattcataagtattgccaaattttttatttgtggtttccggattttcaatcttaatagaaaacggataaaaattttgtaaatcctcctttttggatgtataattcttttgagggtcattactgttatgtaaagaagaagatatggttgaatggtcttcactagacgatgacacactgtaagatgtgggatttctaattaatattggcataggagactctgatgtaaatttatcggttgtatgataatttattgaagaaacactacttttaacgctgttactgttgttattgttgtggttagttgaatcattattattatttgtttcactcagagatgttaaatattgagaaatattgaaatctgaataaatgttatcaaatagaacacatatggtatttggaatctctttaattgaaggatcagtattctcattatcataatgcagaaggttttgatatagttgaatatattcctttggtctttccataatccaaaataaaaatgatttagatgtgtaatgtaagaatagtacatggtatacagtttttctcatatttgaagatatttttttgactaattccagaaaattaccaacatttttatgtgtgagatagaaggatccaaatatatctaaatactgaacaacattggattcgttaatgatgtggttaatgattaaaggtgtaataatcttagtttgtgtgtattttataaattcgtttggatttgatgcagaaacgaattttaacatataatctattgctgtatcaattttatctgcataacttggccaacctttttcttctagataattcttatacgatggcataatattattgttaaaaccataataattactactactaacatctggattattgttattattgttattgttattattggagggattatagagtgccatatttttgaggatagtgaaagtttttgaatgtagtttgattcttgttgatagattcactattcttgtggcaatggcaggatctaaggggcctggagtgacattatggaagcttggtctattggtagcaaaccctactgtagcatttatttttgatttttcctgcttttcaaatgattgtatagaaatatttttgtaattataattgttgttgttgttattattttctttagatttccaatagtattccattacgtcagtcattagtctagtaacaattaatatggattgtaccgtatcctcgttgatctcttgagatataatagatgcttcattacccaataattcatcgattaaatccattgcattttctagaatgggatttaagtctcttgatattgcaacacagattgctattgatctacagtgaagaaaagagccttgttcttctacttcttgacatgttctgagggctgattcgactggtaggatgggtaaaatcttactgaaaaagagatgttttgataaaccttcacatatatatggatttgggttaaaatttgttgaggaggaagataagggaggcatattgaattacatataatgaaaaaaaaaggatgagggaaagaatataatataatgtaaaataaaaggtgtgtttagattctagaatattaaataattcggatccttctataggcaagtgttttgtcaataataaatatatgtttgtatgggcgtgtatgtgtgtgcgtatgtatatgtgtatattactgttttgataaagagtaaatttaaataagagtagagtatattaggttagaataggctatattagattggattggataggagttgaaagtgaaaattaaaacatagaaaggttagaggtagaggtggtatagagattttgaaatgaactctgtgatacggacatatgtgataaatttgaaagagttgtcttcccttttatttttatttttatttttattttttttttctcactctctgatatctgtcatatgaactatagaactagcaataaacaataagcataaaaacaagcaagtttacaataaaagactggtaagaacaacagcagcagtatcgttgtttccttcctgttttttttcctcttatatttgtagttgtggtgttaattgttgctgtaaagtattataatacatagctttaaatggtcggttttgtcctgtcttgaaagttatcatctatagtggtattggttcattcaataaataaggcaacatagagtaatgtaggctgaatgtatatatatatatagcgtatatttctttatctagagattatatatctgttttctataatttacggtagagtaatactgaaattgttcatcgaaggaccatcctttaatttatgttttcttgaataattcttaaatgactcatttgatttaccgtcttcattaaaaagaaataaaaaataacatactttcttagcctcatgatattttatccttttatatcccaatgatgcaaacatctcagtaaaataatctaatgtcatatatcgcgaattattaatacatggtaatggtaacactataaataaatacgagggtctatcccttcttaaaaattcggagaaccttaaacacattgaacctctttctatcggtgttggaacaaaatttaataccagagagcatgatattaaatcaaaccgattgttatcagtcttcggtataggtcgttccatgaagtcttgctgtattatcccatcttcatcattataattatttaaatctatacgagtcacgctattaaatatcccacacgtactaattacattatatctactcaatgagccaatctctaacgctgttgaatcagtcagatcatattcattttctttgatccatcgtataagtatcttagatgaatctccaccacggttggcatcttggcccattctactagcctcctggtaaagatttattccactttcatcttttaattctttcataatgtatcctaagtaaaaacataactgacttggatcattctgtttcccactctgtggtaatttgactaattgttcctcgatcttcaaatctctcgattttaaactatctccacggatcttccaaccttttatgaattctggacttttcaatgtgacaagttccataatttcattgtcatccctctctaatgttgatgtgtcttggaaattcaaccatcttaataataattgcttcctttgtaataaaaaatgatatcttctaattatttttcttgttgattgaggtttaattcttttaatttgggatccatgtggaccaattgtttttcccgttatactttttttacccctttttaacatactccctagccatgtatacagaccttcgacaattcagtgacatatatttgttagttttaactgttatattttccttctctccctctcctcctctttttgattttactctttcttctatcgatgagtttgattcaactatgtgggtttttcctcaaaatcttaaaaggacttttctcttttttattttttagaaagaaagattttgaaaaaaaaaaattttttataacaatgagcttaattaattgtatatcagattatataaagataattaataattgtgtacacaaagagacaacaatatatattcagaagagtaataaattggcaaaaaaaaactgaataacaaatattgtaagcagattacttagatttgaactttattttttgtcttttattttaaaagatacttaataatgggaaaaagtaaaaaagaaattaatgtaaaggatttgaaatggaagaaagttgatattggtgatgctttagacgatttcaatggattttatggattagaggaaatagaaggtgttgatgttaagattattaatggtcaagcgcatttttattctaaagatgaagaaattgatttgaataaaataggcaactatgatagtgataaagatgtagatgaagatgataatgacaatgacaatgatgaagggtatagtgaaggtgaattgattgagtttaaaaattttgatgatattaaagaaggtgagttgagtgctgtatcgaccgatgatgagcaagagaaggaaaataaagatggtatgaatgatgaggcaggtgttgacgaaagtgaatatgaaagtgcaaacgatgaattaaccataaatgtattcacttcaaatattaatttaaatgatgttgatatggaattacccgaatggacaaagattgattcttctttatctatgaccatcttacaaggtctttctaaattagaattttcaaaaccaacagagattcaagctaaagccatcccctatgcattaaagggagaagatattatgggtaaggcttctacaggttctggtaaaacgttagcttatggtattcctatcttagaaaatttagtaaaatcgttaaaggagaacgattttacaagttgtattggtatcatttttacaccaactagagaattagcacaacaagttactagacatttacaaagggtttcagagcaaatcctagtaggtgataataaatgtgcaatattgtccttaaccggtggtctctctattcaaaaacaagagagattattgaattataaatgtagtggtagaatcattgttgccaccccaggtcgtttcttagagttattagaaaaaaatgataaaatgattaatagattctgtgagactaaaactttagtattagatgaagcggatagattattgcaagatgggcattttgatgaatttgaaagaatcttaaaattgttatgccaaagacgccagaagaagtatagtaggaaatcctattggcaaacaatgattttttccgcaacattttccatggatctattcagtaagttatcttcaaatcaatcgttaaataaatttaaaaataacaaaaatagcaaaaattacgatgaattggaactcgtcttaaggtatttgatgaacaaaattcattttaaatctaagccaattattattgacacaaatccagaagataaagttagttcacaaatcaaggaatctttgattgagtgtgcatctttagaacgtgatttatatgtttattatttcttaatgatgtacccaggtcaaacattaatcttttgtaatgcaattgattcagtgaaaaaattaaacagtttcttaaacttccttaaagtttcatcatttcaaattcattcatcaatgacacaaaaaagtcgtctgaagaatttagaaagataccaaaaacaggcacatcacaataacgttctaggtaaaccaactgttttgatagctagtgatgttgctgctagagggttggatatccctggaatccaacatgtaatccattaccatctacctcgtactgcagatgtatatatacatagatctggtagaacagctcgtggctcaaatgaaggtgtctctgttatgatttgttcaccacaagaagcaatgggaccattaagaaaattacgtaaattattatcaaatgataagaaaattgttaaaaataagaaatggcaaaagactgttccattaatgcccattgaagtcgatgtggtgaatcaattaagagaacgtcatgaattggccactcaactagctgatcatgatattgcatcaacatcacttcataaagatgataattggctaaaaaaggcagcggacgatttaggaattgatgtggattcagatgatgaaatcagggatgtatttttagccaagaacaagacaaagaaactaaataaaactatgagtaaagaagaggtgaaatatgccaaagctcgattgaatgagttactaaatgaaccaattcgtaaagatcgtagaaagaaatatttaactgggggattagttaatcttgcagatgatttagttaagaagagaggacatgattcgatcgttggtcaccataaagttgatgcattagaagtattaaaaaagaaaaaaccaaagatttaaggcaacacttggcattattatgctgctcgtatagcaacaaacaactatctcttgatacctatataattgcatatacctttgttataaaatacaaacttgtctaagaaaagataaagaaataattgaataattaataatatacaagttacgagatggtttataagttctacatataaagactcttgtagatttgtaatatataaaattgtaataacagttgcaaaaaaaaacaataatagaaacacctgaattagaagatatttattaatgcagaaatcgatcagattgttccagtaagtttgtttgttcacttataagataaaaataagagtttggaagaatgataaaaagaacactagttgggaatagtaataagggggaaaaggaaaagaatggatatttttcttatatgtcactactctcttagatgaaatcataatcggattcaccatcatcatcgtaatattcatcatcagattcatcaattaactgttcgaagttaactttataacgtaataaaccaccaataccaccaaaaccagtaacaaattgggaaccttcttgggacttatcagtaatgaattctaaagtggcaccaaaatttttgtaattttcagctaaccattcgactagtggtttctcttcaattagatccatttctttaccggttgccttatctaaaacataagacttatcagtagattttggatcaaccattttgattacttcttgatcttcagaatccttgaaaacgtatctgatagtttctaagttttcaaagacaattaaggtttcaatagcacctaaatcaagagccttcaaagtatcatcaataccataacagaatttaccagtatcttgggagatttggtcgaaatagtggtctaataatttcttttcttggacaaatttaacgttagataaagcttctgcagataattcaatggcttggttgaaaccattttcaccaccataggaaatatcaacaacttgaacaactttttcggccaatcttggatcaaacaattcagatttatttaaatcattcttaaagtcggctgaaccagcaagaacaagacccttaacattaactttatcattggtaatgaaattttgtacagcgacttcagcaacttttctaacatagttatgtcttttttcttctcttaaacgagcaaaacggacagcagattgaccacctctaccgtgtttctttggtaaatcgacagtgaatttgtgtaagacggttcttgtattaccagttaacaaaccgaatagagcaccttgaccatccatgacaatgaaaccaaatttatcgtcagcttctaataattcagaaagagcttcagtgtggaatttattatcacataaatataaagatgtgttaattggtttatatggttcgatatcaaaagtaactttcttttccttaccatcttcagtgataatatcaccacaataaagaactaaaccatttggaggaactttactgtataatttcaatttttgttgtgttgaagtaatagcggataaaacagataatctgttgacacgggacttaatgtttgaagcagtaccatattcatcagttaatttcttttgaatcatagaaatttggtcttttggtgggataactagggaaatcatggaggtaccattaccacgagcactttccagtcttttaattaactttttaatcttccaaatttcaatatttttttcagcgtcagtttccatttttttcaaaagcttggtgacttattctttttttgtatgagtaaatgcaacttgagtaatttaaggcttataaaataatcagaagatagcttttttattaggatctttagctgtaattatgtcgatggtcttgttgcttttagttttctttattttaaactttttttcaatgaacgtgaaatttccaaaaattcataaaaaaatttttcttcgtctgaaacgatttgggtgtgatatggtaaaatacctttttttatttaatttattaatatatagaagtaattagtaataagatagaaagacataatatttatctatatgtttatatatttttaagtactgcaaaacaaaaaagggcattcaccaacttcaactgagaagaaagtacactattcatttataaactctaaagctatgcttgtgttgagtattttttttatgaaagaagatatgtaattactcaaacaattcatttattttatttatagattgtttccattcttctttgtcaattaatattacttcatttattgagtcgtaaacatttatacaggaagagtaattttgtgtatgccaatgggcaaggtttgtataatcctggtcatttattaatcgatgtagtggtccttctttacttttacaccaaaataaatgtaagtttcctttgtctttgactaatggaaacgcttgtataactagtgattttacatcctgtggagaagacaatgtatcttcggtcgtttttcttgtgattatatcgtttttatattttatatataccggatacctgttcatttgttattttgttgtctatcttatatataagttcgggtttctacgatggtatttctattgattttgtaaataatcgttcattaatggaggtctaaaagagttttttcaaattaattattagaatatttgaatatttgcaaaactacgaatgtatatatatataacatatataataacgggtttttttgtcataaaataaaaataaataaataaaaaagaaaaaaagatgatttgaattttgaatactgtgttttaaaaaataataataatataacaagattggtaaatggtagcacgctaagaatacaaaatgtacatttaaagatgtattaaagatatgttatcaaaaaattttcagttttgttttaccatattattaatgtttggaaaagtgaaaatttataagggggcttaaagccttaatgagttttgtaaacccctttttttattcatagtacaaaaaacaccattgttggttaatttgttcaattagaaataaaggcatagctaagtatcaagagttatcaaattttaaacattttgagacaagtaatataattataagcatttagttgtgtagttgatgtaaataaacaataggacatcggtattattaaatttttttagtttgtttaaagtaatatgttcgttgtaatattatattaatttacttttcttagttcttttttttttatttaactaatatacaatatataataacacatagtgtagcttttcttatttttgagttttttcaatagaagcttttataaattttaagtcacatggttctattaatttagattattaatgatatttttaggcataattcaataaaaagaaactttttgattattttcttgagggagttgtgttttttgagttgttcttactttttatttatcttatgagcagtttaggcagtggtctgactgtttacgatttgtataaaattttttaattttgaaaagactagaaataagaaaaattttaaaacattttttttttgaatttagtaattaaataaataatatattatcttaagaaaataccaaagatatatattaacaagatagatgaatttacagtttatgttttgtttgctttctctatatatgaaatatataaaaaatgtaatataagattaatgtaagaccaaaagaaccacaaaagaatggaataactttcccataaatgagatcctatggtatatatgttatatttagacagtcatagaaaaaaaaagcagaacgttattttggtcgtacgagattaacctcccgaatatatataacctagctcagtagattatattacaaattatcttttatcttaggtttactctaatagttaacctcaagaacaactttaaatctatcaatctatatttacttaattctattggaaatagttaatatggaaagtaccatattattattacttaatagttacatccttcaggctcagtaatatttttagtactttttcttatgaaaatcgaaactattatatagaaaaggaataaattctttattattttttctctttccaataatttgtcgtgatctttcgagctagattaccattatactcggtattttaaaaacactattactgcacactattatttaagaaaaaaaaacaatagtagaaattacggactctaaattgttttttgatcgggttactatctaaactactaacctaagaaacatcggatccaagaacagggatcgacatggtccaaataaggtagttatatatcctacacacacaagaatattttcccttgtatgcaataattaaataaaaggtaaagaaagccaatatagaaatattatgaaataatattatttattttcattctatccattcatccaaatattcaatttaagccttttctacatgtgaatctggaaactcactttctctacacacattttattcttatcatcattcatgaagccaatctgaaaagaagaaaaaaaacaatctctgtcaccttgataaaaaagaaaagtgctaataaatgacgacaaactcaacaaaccgtatatacatattcttttgtgctaatcagtcttgagaagattaaactttttaaaaaaaatagtattctttatttatgtagctgttaatgtggtaattagaaatatgaagtgccctaaaaagctaaaaaacaaaaaaacaaaaagcaaaacataaaatataaactataagcttttagactgttctatttttaattttaaattctcttatcttatttactttgatggtttttcgtcactaaataattcttaatgtatgggtgtattacaattagtggaatcttacagcatccatttccttttttagaaaaaacacgaacgggattccacttgagagcacaattacaaaaacaaaaaaaaaatagaaaacaaaacaataaagagcagttaagtttcacgctaccccacaatttattatactttttgtaaacttcatttgaggcaaaacagaataaattatttgtagaagcaagaaggaaagaaaaacaagacaacatattcaggacactcaacgaaaagatggagaagtacacttttttgcatcttttcgaggatttatggtggggagaagtagggtttatctcatgttagattattttttatgacaaatttaaacatgagttagggttggttcttttttattttattatctgaccaaaagagttagaacccaattatcagattatatgaggttctggatacaacacagaaccatcattaggcttatccctcaaaaattgagaaccacaggatcaaatagtaaatactaatctatattattggcaaagagtattactttcaagctatctctccttcaatcacacatataccgggttatcatgttctccaaaggataagacttctcggtctttggaagaactatgattggttctttaaaaaataagctagttgtctacatcaagtaacaaactctagaaaaacgtattaaatcttcgcatgtgatttctctgtaatccaatagtcattattattattattaatattataacctacttactgttatgttgagacatatgttctctcgaaagatatatttagtaaaagaaaaataaaagaaataaccttttcagtaaatagtctttgaaataataaaaaaacgggttaggtttgatttctttcagtgtggaaaggcttttgaaagacaaatataaaatggtaggtcttttacctctcattttctgttccaaatctttttttttcctttattttctctaacttgcgtgtctgaaaaaaaaaaaatctcatatgttatgagatcagatattttctttttttttttaatcctttctccaaactcccctttttttcttccttttctcacgttttctttccctttgaagatgtcgcagtgctttttcttttattttaatcttcgtacaattggagtatactttgtccactttcctttttcgttaagttttagttcctgcttgttttcatttttgtgtccattacggaaacaaaaaagaagaagacgacagacacagaaaagaaaataaaaaaaaaaaaaaagaaaaaaaaaaataaatagaaacaatgcaacgatatcaacagattgttacacagaaaaataaaacgtgttagtctctttgtttggttttatcctctattgataatataatccgtatactaatattattgtgatgatcactttcaattgcaatcatgctattacaatttacattgcctcatgctactattattgttattattatctccaatgttcgattcttttcttgctttatcattctcaccaagaaaattaaattatagagagtcatataatcacagagttgaatatgtctgcaaactgggtggcaagaataggaaaggggtagaggggagagagaaataggaataaaaaaaaattgggtagtaaagtagtaataataataaaaataccaataaatcttgctgattctaaattttgcgtaattaattaacttggattttttttatataaatagttaaactaaatcttgaaaatctcttgggtcttggtttctttcgcaactctctcctttgaatctcgcctttcttctgtgctagttaattccttcgtctgaaagaggaaaaaaaaccaagctttgcttatttagtaatacacacaagtaaatacatatcgaaacaatgtctgctccagttatcccaaagacccaaaaggctgttatcttcgaaaagaacggtggtaagttagaatacaaggacatcccagttccagtcccaaaagccaacgaacttttgattaacgttaaatactctggtgtctgtcacaccgatttacacgcctggaagggtgactggccattaccaaccaagttaccattagttggtggtcacgaaggtgctggtgttgtcgttgccatgggtgaaaacgtcaagggctggaagatcggtgactacgccggtatcaaatggttaaacggttcctgtatggcctgtgaatactgtgaattatccaacgaatctaattgtccagatgctgacttatctggttacactcacgacggttctttccaacaatacgctactgctgatgccgttcaagctgccagaatcccagctggtactgacttagctgaagttgctccaatcttatgtgctggtatcactgtctacaaggccttaaagtcagctaacatcagagccggtgaatgggttgccatctctggtgcttgtggtggtttaggttccttagccatccaatacgctactgctatgggttacagagtcttaggtattgatggtggtgaagaaaaggccaagttattcaaggaattaggtggtgaaatcttcattgacttcaccaagtctaaggacattgtcggtgacatcttaaaggctaccaacggtggtgcccacggtgttattaacgtctctgtctctgaagctgctatcgaagcttctaccaggtacgtcagagctaacggtaccgtcgtcttagtcggtttaccaggtggtgcctactgtaagtctgaagtcttctcccacgttgtcagatccatctccattgttggttcttacgtcggtaacagagctgacaccagagaagccttagacttcttctcaagaggtttagtcaagtccccaatcgtcattgctccattatctgacttaccagaaatcttcgacaagatggaaaagggtcaaattgttggtagatacgttgttgacacctctaaataagcaagttgaatacaaaaagatattctgatgtgaattaattattttttgtattttattcctagttatttttttaatgtcatgtattttttttttttgagaaaaaagaaactgatgtagttcatagttattggataaagttttctctttatgtataatgagtatttacttttaatgatatttttcatatttagttaattttttccttctggtgatctcgtcttactgcctgggcgttttcttgttgatgttttgttggtgtccttcgtggggagttctaggagcagttatagtaagctcccccagtaaagtgtctgtcaaatgtgtatacgactattctcatataaacaggcaatctgctctttttcaaagatacagaaaatgccctatatattaaacaagatgatgtaaccactatatcttttttttattctttttttgctagcacatagttgagtcaattgtataaccaattgcacagttaactactaatatcacacactgataacaactaatctacggtaccgaaatatctgccatttcaaacactgcaaataactgacttctgtatatgactctattatctctttataatcacacaaaatgattatattatttttgtttactactttgtaggattcggcagaaaatggttccgcaattattccgaatggaatttctttccttttctttctttttttctctctctttctgtatagaaagaaggaggaggaaaagtaaagaaagatcaaataaaggctattttactgatttatgtatcttgtgtactgtgaaagagtaactggggtcccattgcttcgatatatagtagttgttggacattagtaaatattgaaatctcaaaaaaataaaaaaagaaaaaaaaaggaaaggtaagcatctaaaaccttttgtgctgtctaacgcattcatttattgattgattgatttacttgtaattttattctttattaatatattcttttccagacaagcatatacacatacatattcatacaaaaatagtagggaaatgttcattcaattaagatcattctcttctatgagaacagttttacaaaatgtgacaagaacaagaatagtgccaactttaccaacattctattcagctaatcctgttcatgaaaataacatcaacagattagaatatctactaagtaaatattctaaaatacctcgtaagttaaatatatctgatccattactaatggcaagagaaaaaaaaactgctgttcattggattacattagaggagtacagagacatcactgggtctggggtaagattgaaacctacacaatataaacagttaatctattatctaaacaaactaaactccttagatccagaattaattagtgaggaagtaagattggaaatggataaatataatagagacaaatcgacattttctaagaggggtcctactcatgatggtacatataggatcccggaattagattcccagggtagatcaattgctgttggcagacgtaaatctgcaagtgccaaatgttacactgtgagaggcgaaggattgatattggttaacaaccgtccattgaatgactattttgtcaacattaaagatagagaagccataatgtacccattacaagtcatccaaggtgtcggcaagttcaatatctacgctttaacctccggtggtggatgcactggtcaagctgatgctataagtctagcattagggaaatcattattggcatttaatccactttggaaatcccgtttacacaaagctggttgtttgactactgattacagacgtgtggagagaaagaaaccaggtaaagtcaaggctagaaagatgccaacttgggtcaaacgttaaatcttcttcttttttttatcgacatatgcataacaaggtatatgcatctatatctatgtatatacatgtatatatatgtatgtatatatatgtcctttttcttttgatctctttaattagatcattcatatcaccatgtaaatataataaaaaacaatggaacaaaaaatttattactaataaataaaactatatgagacattagtgtctatatctgtgaatcattgggataaactgtatttttaggatcaaccatatattgcaagtctgattgcccaatgttacagtaatatcttttaatatcttgtatcattgtcgacgacttcgaaaattttttttcatttttacttcttttttcgagacaaaagcaataaaaataaatctgatgaattcgaaatttttagtgtagaggaagatgggcaatacttgaacgatgaaactaactacatgaaagaagatgtattagttttgatatatatttattaagggaccctccgtaccagcactactattaccattgtttccaaaactattatatatttggtataagcataaaggtaggaaatagttacacaacacataaaagagaataaaatataataaaataagaccaagcaatataactacataacacaacataacataataacaagatggatcaagagaatgaaagacatgttagaagattatggagaacattcagaacagttaaagaaatggtaagggacagaggctatttcattacacaagaagaaattgaattatcactagaagatttcaaagctaagtattgtgatgggatgggtagaccacaacgtaaaatgatgtcattccaagctaatccaacggaagaagctatcagtaaattcccggatatgggttccctttgggtggaattctgtgatgaaccatcagttggtgtgaagactatgaaaaattttgttatccatatccaagaaaaaaattatcaaacaggtatctttgtttaccaaactagtgttactccaagtgctatgaaattggttccatctatacctcctgcaactattgaaacatttaatgaagcttcccttgtcgtcaatattacacatcatgaattggtcccaaaacatattagactaagttcagaagaaaaaaaagaactattaaaaagatacagattaaaagaatcccaattacctagaatccaaagagctgatcctgttgcattataccttggcttaaaaagaggtgaagttgtaaagattattagaaagagtgaaacttctggtcgttatgccagttacagaatttgtatgtgaaacagagaagataaattattaacttgatttattttcaggtttctatttctatttatattaagagcctttccactttacatggtgtattgatgttcatccattgataaaaacacccaaactagtgaaattagatcagaaggattgaaagaaaaagaaataatatataccaaaaacttaaaaatactcactatttataattatccattaatatttgtatcataataattaaattacatatacatatacacatacatacatgtatgtatatatatataattattcatagaaactagttgttcaaaaaaaatacttcaacaaaacattgaactgttgtaattattaatcagtaatatgattattgtttcttttgcaaatcatatattattctttggataacgtagcacataaaactgtatcgttgatacctttccaccaattaatatttttcaaatctagtgatcccttaggactaacttcgacaccattggaacctaaatacgttggtccaatagtgacaatcagtgaatctaccaaatctggtcttaacaacaatgtattaatcacttgggcaccaccttctaccattattgattgtatttgatattcatcctttaacctaaccaccaattgttcccattcaaatgtgggagagtccataatcatatacgatacgtcaggctcaggttgtcttggttcaccatggataaccactataggtgccttcccctgttttgccttatacaaatcccacatctttgatcccgtaaatttccatttctgtttcatatcaataataattggtcttggcgaatacatcattaaggaagaagttttattatgctgatagttgctatcgtcattgttattattatcagatacccatttacaatttagtccaggattatctgttaataccgtacctgtccccaccaaaattccatcatgatgatagcgtaagtaatgtgtcatgctttttgtctcttcatgtgatattttagttctgatcccatgacctttggagattcttgaatccaaggattgtgcatacgttagtgttacaaaaggttttcgatttgatttattttgaggtaaataaggttctagaaaacttagtaaatccgatggtaatggaattaacgacatccccaatatcttattaattatggtgcgtatgttatatggtattatctattcaaataattaatcttccaggacactactaataaataacactaaaaataatgattgctataaattgtaattatatcaatgtccatacaaatgtgtatatatgtatccacatatatttatataagttctcatttaagtgcatatttttttatatatatgcatgctttctgtttttgttgttcaatttaagttggattttctaattttcaacttctttagtaacagtaaattcgattcttcttcactctatatgaagccactataatattgaatattcgttgacgttactactactattacttctgttattactatcgttacgttttcctaagtctttgtttagagaagacgatggtaaatctttgttgaaagtcgtatcagttacacgttgtggtttaaaactgttgatgcgttttctcttttcaaaatgacttttggattctatattttttgtccggtttaatgatctcttgttaatttggtggtcattgtcgttatcattctcattcacaattgatgcaatagatctctttaagagccgttcttgtctttcttcgaactccaattgcttttggaccagtttctttctttcacgatccagccttaattgttgtctgtccttccatttctcttcttctaaatcatggtctattgtatcatcatcattaagtaataaagttcttttcagcagatctttgtcagtagttgtatagttatgatcaatattaatttcgtttagtgataagtttttagtaactgttaaagaatgttcaattctttgatttaatattttcttttcaatatctttaattgagaggggtggttctctggttaacaaatctttagaggactctgattttctaatcaatatcggcttataatatgtaatttcagcatcactctcactctcactctcactctcactcccacttttactttcagtctcactgctgtcactatctttttcttccaatatgtcatttacagatcgtgacaaaaccaatccatctcgagaaacagcctttttctctaaatttctggtatcttcttccagactagtatggttaatagattcaggtcttctgaagtgcctgattgccattttttcttctattttgttaagaggggaagttagctggtttaaaatgattaaattctatgatatttttaacactttactgctttaaataacgaaaagaagcctgctatattagctttacagagccgtcatcatatattattatgtatgtacacccccactcataatcagcgtgtaaaagtctgtatatatatatatagatacattcatgaacgccaataaatatatacagaatataagaatgggtttgaccttataagaaaatatttttttagataaattatatggaataaacatatataaacatgtacaactataaaacaaaactaatattataatataaacaatacattaatctatcaaccataaaactcacacacacacacacatatatatatatatcagtgtatctatatattttatatacactatactccaaattagtttactaatcaccatttgtattttttaatacaacggactttctccgggaatggtagtgtaggttctttttgtataatcagatagtctataaggcttatcacatgttttggtgtgactctacctaaccatattaaagttcttgtctctttaagatatatttgaacattccccgcaaatttatgacctcccatatgactaatgaatttcacattgacaccatctggccttaggtcagagttatctctatatagcccatatttttgtaactttctgtcgaacattttcttcaaatacggtgctgtaacaccacaccttttatctctagttgtatgtgaacaaataaatacaaaggccttctcatgtgcaatcgatagatttttgtgtttagatagtaactgtttttcatcatagttgtttgataatagatcgggtattaaaccatttaaagtctcgtctactttagatgaatgtagatcattgatccacaagaaatgaggtaaaatcaatacattatttttagtatttttcataacttcaatatccatgatgtttattggcaatgaggtgacactacaggtcaaagtttgtccatcgccaatatcttccttttgatatttctccaaatttgccttacaccaattagagattttatcttgtacactaccaggcttctcttggcatgcatcatgtttccaatcttgttgtgacgttggaacaatgaaatggacttttggtatctttgaagtattgtacaagggttcactccaatcaatgaccaatttggagaaaattttttctccttctaagagggtctcatcctcattgtcatcatctttatctaatcctgaacaattttcgcattcatcatgatgtatagattcagttagtctgatctcttctgaaatcaatttcttagcatccacagtaagcaaatcaccttcatcactcttcaaataattcgaagtttcatctttggtgatactgctaatacttttactcaatggattcttaatgaaatctttaatccccataactcctattcttttcctatatcctgtctatccaactgtccatctgactatttatttatctatccggctaatcacgggcgattctttctgcattaactgggacttatgcgcaatcagaaccaccaatagactggaagaagagagaagattgtaggaagtcttagcaagaaaagaaaaggagggacaaaaggtaaagaattcaatcttaggtcttggcagaatttgctttccccccattcctctcttgtcctctcctcttttcttccatttgtcttggcttgcggaaaattatcacaccattcctcgaaagttggacaatatgacaaatgcagggagattaaagccaaaaaaaacgattatcctgaaaattgggtgtaacttgtatttgtaggtgctcacttcctatttgtaccatgtatcataccataccatactatattataccacaatatactctactatacacctttattaccatatcaatatatcaatcgtctctcctgactcagttatccaagaattggtatagctttagaacgtacaaaggaaatcactgatcaaatagatgtacataagtaattgcaactatggtcctaataatatgctgacttttaatactaacaacaataataataacggtaacaaccaagattctataaacaataataatattcaagatattgcatcaacttatcacccatttaacctctttaataacattccaaatactatcaaacccatcatcaacaacattaacgttaacggtattaatgctaaacataatcctactgatgcagaaactaatcataacttcatatcctcaaacccctcatccttccacatgcaggatcaaaatcaaataaaaatgtatccaagtcatgtgtacacttcgtcaccttcatttgttacatacaattctaatcttggtacaaacacaggcactaatatcatgatcaatcctaacaataatctcacacaacaggtacctttatcatatgtagtttctaatcaacatactatcgcaccctttgcaacatcttacatccctactcaagtctcgacatcttcaaatcatttcaatagtgtattaaattcttcaatcggtaacaacaacagcaacaataacaatgataactacaatggtaatagttctcaaattcccatttcgaatagtcgtgtagataaaaaagagttgtccaataccattaatataaattcggagataatttctacttacaagcaattcaaaagaaataatagagcatgtgatacgtgtagagagaaaaagattaaatgtggtccattggatccaaccattggtaaatgtaataactgtattaaaagaaagagaccatgtactttcaatttccatctaatattagaaaggaataaacagaataagaaaaagaaactgagggatcaaatgaattcagcagccaaaagaatcgaaagattaaccaacaaaaacgttcaaactgataaaattgaacaaaatgaaaatttatcttctcaattggaaacaaaaaataatcatcttgtcgataaattattaaggaaactttatttatcaaatgatattgagtttaattgtattggtttgctcaatgatatcacttctaggacggaagtgccaaatattgatgttgaatttgcacctaagtgtaaatacaaacaatatagaacaactttattttcatcaaataaattggtttggattgcgtgcaaaattgatagttttaagaagaaaaataaaagtaaccaagaagattcaaattcaactttaaatgatttttatgaacccattaaaaaacattttaatgaaatatcgaaatggtatatgattcaattgaaaaaattgaccaatttcgatatatttttgaagaaagatcaaaatggtaaccatatgttatttgatctaccagaggatattgaaaaaactaataggatcctggaaagtttacatttctctttgttattttttattacgccaatagtaacctcagaagaaaccgacattttggtgaagaaatattacaataaggaagatatggaatttcccgaaatttttttacttaatgtctctgtactgtttggaatccaatcattttatgtcttacattcaaaggatagtattcaaatcaggaaggataaccacatgccatctattgaatacatggaggctatagaaaaaaaattgtttagtaattgcacatattgttataataaagtgatgatccattcgagcaatatatatgtcttaaaggctctattactttggagtaaatatatttcaattactttaagtaatgaactagggctcgatatctttactaaggcaacctatatcattcaggcattaggattacataaaaaatcttattataatggcctttcaaagaaagatttcatctctgcgaaaggcttatggtggtattgtatatctctggataggttgaatgcaacaaatctttcaatgtcacctttaatcttttatgaatctactttccctacctatatgtcaaaagaaatatttttaagcgatttaaacacattattagaatatgataataagaaggatgagcaaatgtcaaattttgaagatgcagtagattatgctgcatcacattacgaatattttacacttctaataacgtactatggttcccatgtcagtaaatacgaggatgaagtaatggctacatgttttagtagtcaaagcatcctcacttcatcatttgatcaattgttagacaaaactttggcaattaatatgagtttactaaaatggagggaaaatctacatcctgcagttagattagaaacattcaaagattactataagattctctctcttcaaaatactcaacaaaaaccggaatttcaatttgaggttatatgctgttatattatcacatatcattttagatatttgacccttttaattactttgaatcttttcattatctctttaattgatgataacatagcaaatgtggcaaacaattcagatgcgtttgcaagattaagacaaataaaaaaggaatcaataataaaatacactgaatatgcacataagattttaagaactttttgtactcttaaaagtcaaccttttatttacagagaatgcttatattttttctataccgctgtgtttgcattaatgtttaaaattatcgacagattaaacgataaaacagcacagctggacaatatggtgttacttgaagtacttcacagaccatatcatataatgttggagaaagagcaaaacagtaaaatacgtgaaaatatgaagtggaatgcagggtattatatctacgtgcatttattaaaaactatcactgaatctactttaaatgacgatctgtatttgaatacatttgcgcaaaaatctaacatctatgaagccagccttacattaatgacacgtgttgcaaaacttgctaaggaaaaagctattactgaattggaatctgccgatatagatcaaactgaattctctgagaaatcctgcaaaatattcagcggtttaacaaaattttttattgattttttgaaagatgaaaacatacctactgctgacactataaaaaagtatatgcaccactgcagtaataagcagtgtccacagtcgaataaaaaggttccagcggactgctcaatttttactgcacaagaaacagaacctgaatatactgaggaaagaattttgaaagactttaatgaaaatattggttttttgacttacggcacattcttttatgatcgtgatctattcctaagtgaaaccctgaaagattggaacttaatatagagattatcttgtattattataagtatatatatatatataacactcacaaaatctctatgaaaattaacatattcctaaatatagtatatgatataaattcaagaacaataattatattaatttattttttcattaagtcaaaactagcaataattcaatcatttctcacctgtaaaacccggaatagatgatgcaaaaaattcatcaatgtatctaataggctccttctttccaatattatctaacaatgtgatctcttcttcagttaatggcgcaaattcaatgcaactagcaattctaacaggattcaaagatcttgggatcacaactgtaccttttctaatatggtaagaaattaaaatgtcattaactgtcatatgatatttttcacttagttcttttactaatggcagtttaataactggtgcaccagtggaacccaatggagagtatgcagtcaatagaatattattctcagcacaaaattctttgagttcccattgtggaagatgtggatgaatttctacttggttaacagttggcttaacttcacattctttcaaaaccctttgcaaatattcaattgggaagttagaaacaccaatagctcttaccctcttgtcatttggatcaaggtaaatcttctctaattgtttatatgtttccatccaatctgcattttctgcaaacaatgcttcacgttctcctttctttggaagacctttaattccatgaattccatctttaacatcttccaccttttgaaaacataatggccagtgttgaagatacaagtcgacataatctagtccaagatcagttagagtctcatctaaagatttactgacattatcccaatataccggccaaacttttgaagtaacaaagatgtcttctcttctgataacaccatcttcaattaattctttaattgcttctccaatgtatggttcagtcctataaaaccaagcagtatcaatatgtctatagcctgctttgatagcagctttaacagcctgtttggtctcttgtgctcgttctttgggagatgcagtacctagtcctaaggccggaatttgaacaccattattcaatttaaatgtaatttcagtagtctttgggtgtaacatcttcaaaatattcaataatttctacgtcgtttgattttcttaatctgtgccacaataatccgaaatacatgcgcttttttacagacatgcaccctttatatacttcttttatagcagaatttaaaggtcaatttttttcctataacctcggagttaactaatatgagaaaggatttaaaaattttaaaacggagttaatgtaggagtttggaatttaacaaaatcactttcctgttgtaaaaaaagacatccctattacaaattcctttagagtttttaagaggtaaagtgatatagtgtaaataatttaattttaaacctctaaataatttagttaatttctatattattcctttaaaattttacaatgttaaagctagatttagggaatgacaatccttattacgttatttagatacagtcatctgttgttgttcagcaatctatcaatatgaaagatcatattgttcctttatttttagctttgtatcttcatctcccctagaaggtgttatctctgcacaattgtgaagcttttcttctaatatttttgttttgttcgttaatgaggaaagttttgaagccacttttttcataagtgcatctgtagcaatttcatcaaaaaaatattcaatttctgatttagtcgactcaatttgagatccaagcacaatgctggttttatataaataatagtttgaagttaactctttcaaacataattgatattttattagacattttttatgaagtaaaccctcaaaaagttgatataataattctaaaaatttaatagatttatctctataaaacattagaagaatactctgatttttaacctgctgactttcattttctaaacaaccatacgcattgtacaattgatcatattttgtctccaagttttttaaactataatatatatgatcgttttttttatttgaacgttcactacggggtggagtattagtctggtatcctgctggtttcataatttttgtattattatgtgtttctttttttaacattgttttgtcgcttaagaaaacatcataggatttagatattattaattgttgttccactctagaaaggtttgtttctaacaatttaatcttttcttcctttttgaataacaattcttgaaaatttatgcacttatctgaatagtctgtcaaactagattgtaacattatatatatttttctagtcaattcttctgatatatcacctattgctgatgtatctagtataggtaaggccttttcaattgctaccatattataaatattgataatatttctacccattttttctgtaatgtttattttaatgtcgattgcattttccccttgtgattgtgacgtacagttacaaggtctagatttgatcagttttacgtaaccacttctttcttctctacctgtttcaggattttcagaaaggaaaatattatcctctttcttagtaaatgtctgcaattgaccacaatctttattatccaagttattttttgaagtttttgatatcttcaaattgttttgtgtgattaatttgaagttttttaattcttttgttgaatctatcattaaataattgtttttatctatgtcattctcaccagaaaatatattgaaaagtgtcccttctttttgacttactccttctttcttgttctttgatgcaaattttttagttcctttaaatgaatgcatcaactttttaaaacttctactgtttattgatctttcatttaatattgattttttttgagcttcttccatcttttgaacagagtcggaaatagccgcccctgtattgtcttcattggtaggttgaacatattctgcatatgaaagaaaatcctttggatctaataatttttctcttgaaaggtttttttcatttttatttaaaatagaatgagtgtttgacgttaatgtttctcttctaatataaatcggtaaagctttagatgtacctttccttttaaaaaaatgaaatttactttttttaataacttcatcttgtggaagctcttcaccagatatagatatttgtaccatttagtcagtttgtttacttttttgtcttgtagttgctactattaaaaaaatcaatttttaactaaatatcgtttccttttcttctttgtaagctctaagtttttgaaacttatatgctatataatctacaataaatataagattttatcttttttgtgacatctttgtcaaaaaaaagtaaactaaaatttgtaacagtaattaatttaatttagacccacactgtcacaaaagtaagaaaaattcataagaggatacatttaaaacaatatttaggtggctaataaacaagaatactggttatgcctttagtatagtttgtgggacaatgcacttaaaaagttactgaaaccagctatcatgattatttgatatatatattagtatttatattacatgcaacattctttaaatttttatataaaaagtaaacacataattatttgcaatgcattgaaaaagtttataaaatgaacattctacttttttttcattgccttaatttttacactccagtttggaatagctatttatcttgatttatttatcagccagtatcttttatttgatattaacaatttaatgtttaatcatttctgttgtctcatttccaaagatattaatattggtggtatatcttgttatcttaatatcattaattatatgtttcaaaaaaaatacattattatatctttttttgaagatatttctcagtcctttatgtataaaacctttatgcattaatagagaataacaaaataccatagagaataacaaaataccatagagaataaaaaatatgaaaaacgtaatattaccaaaactcatgctttatataaaaaattctagtcattagcttcacttactaaaatggtgtttaagggttagactattttgaacctaaaccaaataatatatattataattctcttattggcctagttagtcaagtaaatatattttattagataccctcaatatagatttatatatccgttgaataattcttgttagttattaatctataatatatatattattttatgtattgatacactaaagtatattgcactaatattcaaagatactattgcttttcgaacagcaccatagataagaagcgacacagatcaccaacattatagaaggatataaagtttattaatttgaaagcatgaaaaacaagaacgtcattgccgactaaagagttcacaatatatcacaagtgttatcaaaatactataaccacaatattattaccaatattaatgtaataactcttaggttatatgtttctgataacagttaatcttgttgaaattacaataatacttcacttagatagatataagatatagactctttctatatctctagatgtgatattcctatatatctatacatctatatccttagttcactagaattaaatagtacgcacttatatactatatctaaacctatgtaatccttggttccttgttccttgcttgcttggttgtttgttcttcttggttgctcttttgtacttatgttggttactcctgcttttatctatatttgtaaaattttgcaaaaagaaaagtttagaaaaatatcgttaaccctcatttttctaaacaataatatcagggatattacattttttacaaaaagagtgccatctcctggaatcgaaccagggtttcatcggccacaacgatgtgtactaaccactatactaagatggcttgaatcactgccctcttgttgtggaatagaatagttataaccatcaagattacacaagatcctgaatgaatctagaaccaattagtgtattaataagccatacatgtgctacaacattagatgctgcataataaaaagattggattacataagatcttggcaaatctagaatttacctattgttttattaagtcccacgtgtattactaatcaccatgattagagaattgggatgcagttctaatccagtagtgcacctaaattaatataataaattttagggtttgaatcagtcaagtcattaatgtagtaatctgaataatcgatcgagctccagaaaacatataaaaggacaacgttttcaggagataaaagatcatcttccataatcgtttcttgtaaataatttatatattatgtataaacaaaatagaacaagcaagtaacaagttaagtaacttcgaataagtacattagctcgatataagccgcttaatatataagaccgttttagtaattatactatcgactatagttgattactgtctcgattatttgaattactattaatattatttgcgcttccctggaatacacaaagaacttcaccataccatactacaacacctctcatcgtgaaatagaataatcataaccatcaagattatatgagattctgaatgaatctagagctatttattgtattaataagccatacacgtgctacaacattagatgctgcataataaaaagattagagtacatgagagtttggtaaatctagaatttacctattgtcttaataagttccacgtgtattactaatcaccatgattagagaattggggtgcagttctaatccactagtgcacctaaattaatgtaataaattttagggtttgaatcagtcaggttattaatgtactaatctgaataatcgatagagctccagaaaacatataaaaggacaacgttttctggagataaaagattatcttccataaccgttttttgtaaataatctatatattgtatataaacataaatagaaaaacaagcaataatccttaattctcctatatataacgttcttatatatttgttattgaccttactattcattcaatagtcctgttaaagaattagtcctaaatccaaactataacactgttgtaatataagatggtgagattctttgtgtattccagggaaacgcaaataatattaatagttattcaaataatcgagacagtaatcaattataggcgataatataattactaaaacagccttatatattgtgcggcttatatcgagctaatatatttattcgaagttacttaacttgttacttgcttgttctatttatgtttatatataatacataaattatttacaagaaaaggttatggaaggtggttctttaacttcagaaaatgttgcccttttatatgttttctggagctcgatcaattattcaaattcatacattaatgagcttagtgatccaaaccctaaaatttattaaactaattcaggtacattagtgaattagtaattgcaccccaatttactagttatggtagttgggcgcactactgataaacggcacaattattatggtcattagtaatacatgtgtgacttattaaaacaataggtaaattctagattcgtcagaatcttatgtaatcttggtggtaatgacttctctattatacaacaaagactattgtagtttggactataaaactgacttagataattgaactattgaacaaatagttagggtaataataaatatatataaagacgttatatatagaaaaattaaacgattattgcttatttttttttcttatacaatatgttacatacaataataaatcagataaaaacacaaatttaaattataagatgatagtcctttatatataaatcatgggctgataatttcttatttggattctgtaatgattgccactgttgaacacatatctctttgattacctcattaatgtttcattattgtattacctaatactcgacaatcaacatgtaatttattaacaaaccctaagttctataaatccaaactagaactttttcttgacaaccatcacaaaaaccctaacaatatttttcaaccctaatccttttttccatttaatcataatatcaaggttggtctataacaccttcctctcccaaaaattcaggtaaatttctgaaatctgataataatgaattgtgacgatcagttggaagtttgttaaatttgtctaaggtatattcacacaccaactcaggattaacatcttgcatcttacagtagtaggcttgtgactcaatgtcatagccagtcacagcgatgatctcttgaagcctcaggattctttctgtagcggtagctggtgaatctttggggtaacgtctgttgtcattcacaaactttttgatatttttgtgctggaattatttccatgaacagtgcatattaaagaagttttttattaattaaagactctattatggaaacaatgttatatgtggtgtctggatgtaggaaagaaaaaaaaataaaaaataaataaaaaagaaaaagatataaaaagacactttagttacttttctataatccatctgtacatatctatatattatgtacaaacagaagaaaaagacaagcaacatataaactaaaatatttaacgtattcaccggttaaggccacaggcatccagtagtttccatccatttttgaagactaaatattcactaaccagtgaagtaggacttcctgtgtcaaacagcacagggacttttgttttattaacaatacatggacgttcatgatgggtacctactaatgatttggtagtagctttaataatagtaacttctggtattgtagtagtatcaacgtcgtttgtttttgcatgtttatcagcatgttttaattatgtgtatagatcagctctcttcttgaatgaaacacttattttctgtttttgattttttttaatttttttgattgttggaaatttggtagagagaatgaagaagaaagaagggaattggaatgaaaagcagcagtattttcagtgacaactcgcatttggacaagtactggattgatgttctggtttacaacatttgaaacataatctatattctaagcacaaacgacgaaaatcatctttatcacgtttattggaagaagtggtaccagataagttgtgggatcttcccctcctgaaagatgaatcattggcagaatgcgtagaataacctctacggtaacgattggaagaatgaatagccataatggtatcaccgtcactatctaattgataggaaccagagttagatgagacgtcacttgagtaattaattgtaatgaggtctaataagcagtgctcacatttgtgagcaagttcagtggcattatgaaatattggtggagattgtaagacgacagcttttctagtgtcgggttttaacctttaaataaaataacttataagtatctgttcgctcatgacacccttgggtaacaggtttttgtattgatagaactctttgatgtacccgtcgacgttattatgttgttttaatgaacaaattttgcgactgatgtagtacacgtctggttgtgcatcaaaggagtcagtgaattgagagactaggctggaataggaagtagaatgtaaatcataatcagcagagaagttaaggaattattgtgtagctttacctccaatattgtcaacaaagaaacaaattttacggaaatcatcggtgatttggtgaagatcaaattttagatctagggataacaaaaattcacgttaagtaaagactgaacgagttgaacctgtaaatagttgggggacttttatggcttgaataaagacaggattggctggaacttaagacataatatacaaaaataaaattttagcggcgctactaattgttgtagtttggactattccagtagagtttaaaaaagaagaaggatctttcaatatttgtcaataaaacgtataagtttaaattttcaaagttagaatttactagaaaatacatttttaatgtcaaagtatgtggaacattgactccaatttataaaatttgcattttctttgatttccatgagagtataaaaaacatcattgagctataaatcatgtttattttatattattaactacatatgtggtccttagatttcctaattaatgtatggttttttattacttttaacacttcgtttgaaaattcccatttgcttcaaatctctaaaaaataattttaatagaaaaaaaaatgctttctgtctactactgtaatacattaaaaaatgataaaatatagagaaaaagtaacttaaaataattcttatagaaatgataatgataaaactctcatttcccaataagctaatagtgctgaaatcaagtgttctaggataaatagatggaccagcgatttttttattagtatcaatatatactgaaatataaagtaagtgctatttacttatcaataaatgaaaacaaaacaaagtgataaatttctattctttcccataaaagagaaatgtcaaatataaatatattataagactaatagttttttcacattatgtttccaacctttgcaaattttttttatatattatcacttttgtattgcaagtgtaaaagagaattaaagaacttttcttggattttgtacacaataaatatacaatatatataactaaaaacatataccatataacaagtgaatacacgagccaattttcaaaagatatgtaaaatatgaataaacctaaaaaatgtgccttttttcaaattaaaaaaataagtgcacggatagagatgccttgttatttgtgataaagattctattatattagaaaaataaagaaaagcatagcccttcatatgattacttccttattaaaccaaatataatgaattgataaaatacttatacatagatatatatctatttaacataattaccttgataggcacgtgttattgtaatggagcatacaaaatttgtgtaacatacttctgtttatatctgactatagaagcaacacataaggtattatgtttaatactgctagtagctaaatgattcaatattacatgatttggaataggcaaagcacctgagttattttcattattctcagcttgtgaatgagaataactatttagaatgacattctctaaatgtggtggcaattgtggcggagtcaaccatgccatattttgatgattattttgttgttggtctaatgtcaaataatattgctccataacagttggatcagtgaaaacagctgggatatcctgcgtatattccaaagaaggtttggatagtgcttcatcataatatcttgaataaccatcacccatatcatctggttcttgttcaatttccattgcaattctagagcgtgtactcattggaatagttttcttttttttgttggatgaattttgatttcttgaataatcaggggaagttgtatcatcacgggtagaatattctccttcttcaactgaatgatctacctgttgttgttgttgttgctgtaggcttggtgccgtgacttctaaataattaacaaaattacccatttgatcagtggccgtaggcaagtagtcactaaatcttaattcattgtcgacaataaatctaaatctatgagtacctggtggtaactgtaatttgacatgcaataaccccggtctccctggtacaggaaccagcccaatcattttcctccaattggtaaaggaacctgtgacataggctttattcccaccttgttgccatacgatatctacaggaaccatgacattcttaggattagcttgttgaacattctgttgctgttgctgctgttgttgtgcagatacaaattgttgatctgaagcattatatgccatattattactttcctcagaaatttgtgaagatgtctttgataagaggtcatcaccactattttcattatagtatggttcattatcattacaattatcatcgtcgtcatcatcgtcgaagatcaaagtagatctcgacctgctattatttctagttaagttattcgtactattatttgtaaaattaccgttgtagctttctcgagaatgctgtcgtgacaattgaggttctagttcatttggactgtccacattcatttgtgagaagctttgggtgagtgtatcattaatatggtcattactgtcaattaacatattgttactcatatttcttttattttccattgtaaaaaatatatatatagatatgtttatctatatgtataacttctttgtataaatctattaacaaaaggaaaaaaaaaggaatctttattagaagaaagctttttgatatggttgctgagctaatactaaaaaaaaaataaaaaggagtgtatgtggtatatgtgtagagataagtacctttcttttttttttcttttcctacttatgcatatgcatatgttgatttgtagggttctttttattctctttttgaaatattaatgaataatggctttcttgtatctttcaaagacatctattaatagtactcttaatattatttctactatgaatttttttttctttcatttctcattgtttgaaggataccaatatttttgaaccatggattacttgacaatctggcatttaccatagcagaaggagggggaaatagaacaaaagagttcaaaaaaaaaaaaaaaaacacagatgaggacgtcgggagttaagaagacagacaaacaaaaaagaggagggtaagaagaagcaggaggggaaaaatgaacaaaaaaaaagaaaaagaaaaagaggaaaaaaagagaatcacacggcctaaaggaggccaaaaaaaataatgaaaatgttataacgtttatttttttatttttattcattttgaaaattcgtatcaaatgatagaaggtggtattctactttttccttagcttcgattgcatatttctatgtattgtgttgtattgtatttttatgcaagtatcttggtttttattgttaattgttgaaatagtattttctgaataaatgtcggtccaaaatccaatcaaaaataattttaattatattactgcaaaagggaaaacaagaaaacggtggcatatctaaatgattatttttgttatatttgaagatccaaaaaattgtaaaataaaatttcaaaaatggtgacttcaggtttttggtttagttttacaattttgattattatataaattagggtaaatcttgttttcaaataatcaaaataaaaacatcaccatcatattataaatattgaaaaaaattagttctataattttaactcattgaaaattccatatagtattattgaggttgtttttaaacatcaaattcaaaaattggaagtttattctgactatttctaacacttataatacgctacccttttttaactatttaaatactgtttacattataatacatacacacatacataatatatatatatatatataatattccaatataaaatggagttatttcaaggtcagtaacttttcacttccttatatgtaaaaataatattctaaacaatacggttgtaaaataattatgctaaataataactatatcaaaaatctatataatactatctcccctatcttttacctcgattgactagttcttcgtttgctttcccttgataccagtaaatactatagaaggtctcaaaacaagaaggctgaatgttcaaacaaaccaggggggaatattgaaaactagaaatgataaaatagcaggcatgcccgattatacttaagatcagtttacagcattacacaacagaatgaaaagtgtagatggtctttaccaatataataaaaatatgaagactaataatgaaccatctaacctaaattttattggtgccaatgatgaagaaataaacgaaatgactacatttttagataaatatccggttttatttcattaatttaaaaaaaaaacatatacaaaaagaatgttagtaatttgcaaaatctttacatagtagccgcaccaaataactataatataaacatcgcactatctacttcaagaattgtttatcttgaacaataccttttataaaaaagaaagtttaatgacaaaaactttgtgatggaaaaactacaatactttatcaaactattttttatataacgaaaaaaaactctcaggagactaatataactttctataacattaacaaatatgaacatacatatcataggttttctctatgctatctctttatttttccatttgatccaaagatacattataatttaatattattttcaaactgacaatgttagagtttctttattatgaatatcttttactaacgatagtacctcacaagtctgctactatgtaagaattaagaatctctctctgtctctctctctatatatatattttcaagtgataaatctaaacatatttttttattttcttcagaagatttatttgaaatggcaactgttcaaactcaaatacatattttgccactaacaatgactaataatccatctattcatttctctgttatgtatttgtattaatattctcctcctacaaaatttattccttccactattatctgaagttattttattattttccttctcctttttttttttttcttcatggcttgccaaaataaaaaataaagaagaaacatataaatgacaaaaaaatctgaaacaagggaaaaacagtaaatcaattgataaaaaatcaaaaaaaaaataaacaaaaaatagggggtagtaaataaaaacgtcttgtttctaacaaatttacatacttatgtcgagttcatcgactgttaacaaatttttagcttatcatcagtttataaagtactttaactaaacataacgctgctgtagtttcatactaactaacctttacattctaaataccaaaatttttttaacataaaaaatcaaacgacgaaaaaaaaagagcaatagatagaggaatctaggaagtaacaattaatttactttcataatggtagccaaaaatattagtgctggtagtggagaccaaatttctatatctaagtccaaagcaaatcaaatggaaagaacaaagactaatgaaaaaactgtcaataaagtgaaggaaacagagattaatgatgtccctataactgatataaaaaccatcagaaaaaagaaaacttcaaactatgtcggctggaaacaaatgggtcattgggaagaaaaggatactttaactgaaaatgatttattattagatttaactaaggacactatcttagataatcttattccagaaaagctctatggtgactggtatcatactctggctattgtagccttggctggtatcctttcgttctttatgggtaagttaaaatggtctttagctccagtatttttcataatcgttatcacttctttatattatagaacctcttccagaaagtatagatcttccattaggaatctagttcaaaaagaatttactgttcaaaatattgaaactgataatgaaacgatggaatggttgaatatgttcttggacaaatattggcctattttagaaccatctgtttcacaaattattgtggatcaagttaatgatattttagccataaatccaaatattccaagtttcataacaaatctttggatcgatcaatttactttaggtattaaacctccaagaattgaaactatcaaaaccctcccaaacactgaatctgatattgttgtcatggagtgggctgtgactttcacaccacacgacttgaccgatatgaccgcaaaacaaataaaaaatttcgtcaaccaagctgttttgttaaaattgaaattatttaactttttaactctcccaatctccgtctctaacctatcctttaatgttaaagcaagacttagattcaaattaatgacaccatttccacatgtggaaactgttaacatccagttgatagatgtccctgacattgattttattgcacaaatcctcggtaatacaattttcaattgggaacttatggcaataccagggttatacccatttattaaaatcatgatgaagaaatatttaagcccaatgctaatgcccccattttcgttacaatttaatattccaagtttgttatctaattcccatttatctatgggtgttattgaattgactattaaaaatgcgactgatttacacactgggtcaggtgacttgttacagacatctgttgatccatatctaacctttgagttaaatggtaaaattgttggtaagacgaatactgtaagagacacgttgaatcctgtttggaacgaaacttcatacattttagttaattcattaactgatccactgacaatctctgttttggataaacgtgtcaaattgaaggacaaacaatttggtagaattgaaattaatttaaatactttgactacaaaatcaacgcaaaagaatttgaaggcgcattttctaagaaactctaagaatgttggtactttaaatttcgatttagcatatttcccaactttgcaacctaagacactaccaaatggtgacgttgtagaactaccagatttaaataccggtattgccaagattgtggttgaagaaattcagggtatgaacacatccttaattgaagaagttgatactgctaataactcacaagaaaatataaaaaaaagcaaaaagccttagagaaagaaacctattctattcatgtgtatatgaatgctaaacttgtcttggaaactaataaaactaaaaatgatattaatggtacaatgtcttatggaaaagaatacgaagcagttatatcagatcgtcgtaaaactatgtacagatttgttattaagaactcaaagaatgaagttgtttgctccacagttcaatctttgaatgacttaattgacagaaccgaaatcgataaaaaaatgattccattaaagaattctaatgggggcagtttaaaggtttccacttattggagaccagtaagattagatattggtttgaactctgttgcctataccccacctataggtgctatcagaatctttgtggaaaaagctaataatttattgaatttggagaaaattggaaagattgatccatatactaaagttttagtgaatggtatttccaaagatagaaccaatgaaattgaatctaccttgaaccctgtttggaatactcctatgtatgtatctgttacatcaccaaaccaaaaaattactttagaagttatggatgtggaaacaatcgacaaagatcgtagtgttggtaaatttaacctagatgtacaagagttgtttatcagagatgacaatgataaatacgaaactgttattggtaaacaaccacacgtatgtcgcctaattactaagaagggtgcttatggtaatcttacatattttatttcattttatcctacattgcctattctttctttggaacaaattgaagatttaaagtcaattgaaaagaagagaatcgaattagatgaaaagaggaaacaaaaagcaaaattatccgaaaaagaaaaacaacatatggaggaactcactttagaagttgaggaatttgaacatatcttacaaaagaaacaaaaattgagccttgatgaactaatgaagtacaagactggtgttcttgctatatcagttttagatggttttgtatcgcaacaaggcacctatgttcaggccttttttgatagtaacggccattctcgttttatttcaccaaaaatcaattccacagttataaaagatggttggaccggtgatgtaataatcaaagaattggattattctacagctacatttagagtcacgaagaaaaagaatgctaatagagcagaaaactgtttgtgtgaagttaccgttccaacaagtgaaattgtcaaaaattgttattatagaccatctatattaaatttatccggtgaggccagcggaaaattattaatccaatctcaatggttcccactagatacagaagaattacctcaagctgatttgatcacaaatcaaggcgatttaactgtaattgcaaagagtgcagaaagattattatctgctgattcaaacggcttctctgatccatacctaaaattctatttaaatgatgaagatgattcgattttcaaaactcatgtggagaagaagactttgaatccaacatggaatgaaagaaatacatgtgagatcagtaaccgtattatggatatattgcatgtgaaagtcatggattgggatgctacctcaggtgatgattgtattggatggggtaaaataagattaagtgatatagttccatataagacaacaagtatagaccttccaataatgttggaaggaaaagatggtggtattgttcatttagattttgagttcaaaccaaaatacataataaacgtaaccaaacatgaaaaaaaggtcagtgatgttgctgcgaagggattaggtacaggtattagagcaggtactactgttgttagtactggtgttggaactgtagaaaagatcggaaagggtattcttggagtcactggcctacgtaagtctaagaaaaaggatgaagaacaatttacctaaggatgatcataaacatagtaatttatggacatattcccacacatacatacatctatgtgtaaatttataaaaaaacaattatgattatatatgatatttttttatacactaagaatgcacaatgtatttcatcgacaataataaactatgtctatttatacagacacattgatatatatatatatatatatgggaaaaagttaaaaagaaaaaagtaggatccacatcaacaaaacaatatcttaaagatttttactatggaatcttatatgaaagtattttacctttcttctagaaacctaatagtgatgtcaatttaaaaaaggtgaaaggataggattgttttatcgaatacatgtgtgtaaaagcagcaaagaatgagtatagtaagatagtaccaactatagctaaaacataaactaaataaggtgagtttatatgaatgttacctttactattcttcttcttagatttcttggtgaaactaaaatcaacagaatcagtcctgctattattgttactattgctattattattattattattaccactactactattattatggccactattacttctaatactagtgttactaatatcaaaactgtcagatgatgtagtgttatcattacttggatctaaagctggtataattttaattaagaaaatcattaaagcaccaataataccatagaaaagagccacgatttgagtttcaataccaaattggttttgaaagtccttttctgcaaaatatataatatgaccatttctatcagcaccggcgagtggtacttgtctcatctttgtaaacatataaccactaatcatgaaaagtataaagattacactggctagaccccaaatccatcttaatctaaccaacttcaatattaggttgtgatttttcttgatgagaagagtggaacagaaaacaataagacaggtgacaaagacatttgcccaattggtttgttgatggataacaaagtcggtgtcatcactgattcctgttgatcttttaatccatttgagcatctggttagctctttcaggaccagacgcatgttgaatgtcgaaggattcaaattgatgtaaaccagagcctggcgagaaatagaacaatgctggtatatgttgtagtctgaacaatttgaaaatatctggtatatttttaggagaatggacaactgctttaccaaacaaaaatttcaaatctggatcagtattggagataaaatctggatgatccaatttccaagattttgcgatcaaatcgaattcaggattgaattcgacacacgtcctacaacccatttctacagtgtttgtggtaaaaagaagaaatagaccaaaggaatgtgattgaaccaaatcgaatactttatcaaagttttcatcagttacatctattataccatttttatccctttgagcttcagtaatagcgaattcttgcccaaggacaaaggaaatttgaacgagtaagataaatgaaagtaatttgattagaactaactttattgataccatattgataaaatcaacgaatgctttgcatatatatatatatatataatttggttaaatagaataaaaaataaaaaggaaaaaaaaaagataaaacaaacaacaacccttttctagtgttctatttcgtttgtttattaatattgaagatcctaatgtctatttataaatattatgattcattcaatagaaatggtccctaaatgcagtttcagagacttgagatttggaatatgcttacaaatttgtaacgtttacagctctataacttgtattttaaagcttagttaaacagtactttttcatatcaaagaaatcgaggaaaaaagaaacaagaaaaagaaaaagaaaaaacaaaaacacaagcaaaagcaaaataaaaaatatatgtaaggatgttgtggatgtatgggttatttttctcaacttcaaaacgacaaaaagaaaaaaaaagcattttctacagaaacacccatacatttcccagccaatgcgaatgtgccaattatcttttcaatttatttcatgtttatttttttcttttcgaggaaaagacggtttattcgttgataatgacgacttttgtcctcatttcgaggttccttttcctcttattaatatccccccttttttttttggttttgtttgtttaatttgtcctttcttctatcatttcatattcatacaagaaatggtacatctatctatacttacataactcttaagaacctttttctttgtcatcctgctttaagttgtcataaaatctcttggaaatgtatctctctctctctttttctctctctatacatatacatcacatataatctgaagtattgattttctgttttctgttttttattttctactttctattttttttccttttccttttccttttcctttttctctctactttctagtttttttttctttttttgttattttccctttccccatatatttactataacatctatttgtcaatctatttgtccatcaatccattcgtttatctgttcataccattccacaccgtacctcaatacaattaatcgatatcttatttgttattttgattacattttaatcctttgatactgactcatcctctagaagtacatattgattctcttttcttctatatcctcttcttcttttttttatcctttttttttcccttttattgataacctttcactgtaactctaaatatatctatacatccctatacttccatacctctatatcgccacatttctgaagttaaaaaaaattataaacaaataaataatgcctatcaattctttagagcaatttttgtttgaaagaggtttagtcggtactcatcccatcgaatccttaaaaaatactaccctaggtatcgatgccaatcattatgtgtctcgtctattgtcttccaaaaaagaacaatttttagacgctattggcgggttcccaattagtttgaaattatatttggaatctgatttgaaaatctttaaagaatataatatcactcctgttttcatctttaatggttctttaactgttaaccaattggattataatagctatttcactgctggtgccgatgaagctagtctatctcttgctttaggggctacctcaatttcctccaccagtaccacttctatcaacaacaacataaatataaacatgaacatgaatataaacaataatactaataataacaacaataacaatcatcataataataacaatgacaatatgtcttccacttctattaactctcctaatcagaacctgaaatctactaaagaaatcatgttgactcaaagacataaagcatggactcaatggaataatttaatcactagtaaccaacactcttatatcgatcaacccttaaaaccccaggaaccattcagattgaacacaaatatcgaatcaaagagattccagtctgatttgatcaaatatttcatcgaaaatgatataacataccaggtggccccattttcatcttggatccaactagattatctattacaaaacaattttatcgatgccatctatggtccaaccgattgtttgatgttgccaaatttagataagtttatcctaggcatggaatttcctaataaagatttcagatttatcgataaaaatagattgttgaaggatttcgggatctcctatgatgagtttatcgatatctctatgactgtcggtaacgacttacaaccaactgttttaccacctctccaaatttatccaaataacaaattgtttgagatagctttggaaatggttttaaatacaggtactaatttttatgcttaccaattgaataacaggtctattaatgcaaataatactaataatactactaccttaaccactgccacctctacaactactactaataatagcaacaactatattttgttctatcaaagaggttgtgcatctttgagacatatgcctgtattacaatcaaatggtagagttgaaatatattcaactgataataacaataacaataataatagtggtaacaatagcaacagtactgatcataataattctgaaaataaagactcctccagtatggatgatgttgatactgacaatgattctaatgacgataaaggggacaagtccaaatcaccatcttctagcttactagatactacaagttcatatccaattccaaatgatgtacacgaattcattggacagaggttacctgctgaatattattattataagtctattggtcttatctcaggtaaattattagattctatcaccacaggtatctaccctgaagaaccacctttagatggtggcgtctcagattcttacagaaaattagttgttgagtctgttgacatgtttaaaaataaagaaattaatttactaacacaacaaattaacagatatttccaaatgaagccaattaaacaagttaaatggtattctcataataataaagtacaattgaccaacagagtcactccttccattatagaacaattgaagtaccttgtagttaaaactgattttggaaataatccattcaatatctatgaatttattaaaattttatatgataatattaatgatctttctaaaaaattcattgccgaaaaacctattattattcctcgtgggactccagagaatcaattaaactctacatttgatttgttatcaacatgtttcttaaggttattagttcagttagaattttttgagtttgatctcgctaaaaaatcattgaaaccaactaactggggtaacattatattacactttaacgccgttttaaacgataatgaagaatactacgagaaattatttatcctgttactatttttaaagactgatgtcttgtccctctctgaagaaacacgtccaaatgttcgctcttcattatctgaccatactttaagaacatatccacaagaatccaaatatattttaatattatcacgtttattaacactcttccaaattgatcaaaaaccaaccacagtttatcacggcccaatcgataaaaaaactttgatatttagagaacatatagactttattcgagaaaacttaaatgatatgtttgaagctttagtcgttgcatccttaacatccaatgaatttgatagattatcattgacaaatttccaatggcaatcatctcttgtacaatatatgccatttaaatgcagtttacctaacacagttatggcagttataatggaattctttttgcaaaaatatttacataatgggaataacaaaagtgatgcgatgtctttagtagccactgaatttagtacttataaatctgttccaaacctatctgaacaatttgatgaatctatgaaatatttgaagatatgtgacaatttaattaaggaattagtcaaagccaaactaatcaaacaggatgaaggtgaattatgtttcaaagctataaaatttgcttcaaactgtatcacagaaagttaagttgatcctcactcatatatataagttgcaaacccaaacaatatcaataaaaactcgaagcagatcataataaaacagtagggagtatctccattcttttacctactaacctattaaagataaaataacactatcttcaaatataaagattgcaagtgaatgaagttacacatatttgttacggtagatatttttaaatatatttatgtatttattttactagcagtccgaagagaaattatattgacattttacttgactgtgttaatcattagttgatgttattggtataaacaaacatgttactagagatcatatctttttttgtaaaagaattgtatatgaagatggtaatgataacgcttgtattttattatactgcttattgttaataaaagattgaatgttaccctcatattcacttatatgttacttttttagtgtgatttttttcatttttctttttttttaatatgataggaaattcagaaagaaaggtaaaaaaaataaaaagaacgaattgtatatatcaagctttaacacatcaaacagactattcgaagcctatgacataccaattgtttatcaaattgtcatagtcaaaccagaacaataatatttaaagactgatatatacaaaaaaaatgaattctgtgtttgccgatcaagttacagaggaaagagcggaaaatgcacgtatgtctgcctttgttggtgctatcgctgtcggtgatttagttaaaacaactttaggtccaaaaggtatggacaaacttttacaaagtgcttctagtgatagctctttagtgacaaatgatggtgccacaattctaaaatctatcccgttagataatcctgctgctaaagttttagttaatatctctaaagttcaagatgatgaagttggtgatggtactactagtgttactgttttaagtgcagaattattacgtgaggctgaaaagttgattgaccaatataagatccacccacagactattattgaaggttatagaattgcctctaaggctgctttgaatgcattagagaaggctgcagttgacaactcttctgacaaagcaaaatttgaaaaagatttaattcaaattgccaagaccacattatcctctaagattttgtctcaagataaagattattttgctaaattagctactgatgccattttaagactaaatgggtcgacaaacttagagcacatccaaattattaagatccttggtggtaaattatctgactcatttttggacgaaggttttattttagctaaaaaatttggtaataatcaaccaaagagagtagaacatgcaaaaattttaatagctaacacttctttagatacagataaagttaagatttttggaactaaatttaaagttgattctacatctaaattagcacaattagaaaaagcagaacgtgagaagatgaagaataagattaataaaatatcgaaatttggtatcaacacatttattaacagacaattgatttatgattacccagaacaattgatgagtgatcttggtatcaattcaatcgaacatgcagactttgaaggtgttgaaaggctagctctagtgactggtggtgaagttgtttctacatttgatgagccagataaatgcaagctaggtgaatgtgatttgattgaagaaataatgatcggtgaagacacatttttaaagtttagtgggtgtaaagcaggcgaagcttgtactattgtgctaagaggtgccactgatcaggtcttggatgaagcagaaaggtctttacatgatgcattatctgttttatctcaaactacaaaggaaacaaagacagttcttggtggtggttgcgcagaaatgttaatgtcaaaagctgttgatacagaatcgcaaaacgtggatgggaaaaaagctcttgcggtagaatcatttgctcgtgcattaagacaattacctactatcttagctgataatgcaggttttgatagtagtgaattagtcactaaattaagatcgagtatttacaatggtctttccacatcaggccttgatttgaatagaggagttatagcagacatgagggaattgggtattatagaaagttataaattgaaaaatgccgttgtttcttctgcttctgaagctgcagaagttttattgagagtagataatattattcgtgcaaaaccaagaactgctgatagacagcacatgtaaaacttccttgcatatcactatacgtatacatatatacatatatacataggtatatgtatatatatgtagccttacatgtacaatatttattcaatagtcttaataaggatccaaatagaccattgcctcagtaccataaattttcaaagatagtattgatatgtgaatatatatatatatatatgatttttagcacttactactgaatttacatactactgtcagcatttgagcaaaggaaaacaagtgaaatctcaaggagatcttagcatatactcatttctatccaaaagatcaaagaacagtgccttaatgtgttattgctacaatatatactcattcaagcgaaagaatacagtgctcttacttcttcttttttctttattttttctggtttttcaacacaaaaaaacaaacttgatacatgccacactttcctgttcacctgtttacgaactattattttttatacacattacatatatgttatctccacccatatcaattctctagttttctctttgtcacttttcaacattacgagagcgtacttttacaagtgtattgatgtaaatatataaataacgaagaaaaagcaaaaaaacaaaccaaaaatgaaaaacaagaatttcatttaattacgcgacgctgaaaacagaaagggaaggacgaaaaaataaaaataacgaaaaaagatttttagtgacacgaaaacatttggcgatgaacaaagatttttgtgaccaacaatacaatgccgggagactcactaacaatagaaatctgtgaagaaggaggagaatacccccttcaaacacaatagcttgttcttgccatttacaaagcttttgcctgaatattcgtatctctattgtttttttatttcctttactcaatagagccacgtctatatttagaagatcctcgagctatcttttagagagaaaatagaagaaccattagatgtttcatcaaaagagaccttgttagatatgtagatacgccaaatatattaccttcttgggaaatgggtatataattagtctaatagacagttagatacttctgtatacatatctgcgaaatgtagtaatgtatcttacaactgttcttcacagccaaacccaatcaaacaacatatatatccaatacaaaaaaaaagcgaacatatcttctaaacaacatcttgactcgaaagaataaatttaaatgtcaaaataagttgatgaattaaaaattcatcagttagtactttccttttcttctcttctcctttctttctttgacaactttaaaaatatcttcttgaactctttaaatagtaacatttatcaaatccttttaaccgaggaccgttattgaattgaacagtttacaagaaatgtttcagttggattagtcgtcatttattattacatagtgtaaatatattccaatttgatacttttcgatctcgtagaaaatcatactcatattgacaataaaaataagaacaataaataacaatatttgatacttatatatagacatatgcaaacaccaaccaactataatgattaatttaataagtatacttcccaattcaatatattttctattaatcctgtgcaatatagtctctgctgctccgtatgaggcattcccaataacaaaacaatacccaccaataatcagagctaatcaaaccttcttatttcaaatatcaaatgatacctataaatccaataccgataaaaatatgcctataacatatcaggccttcgatttaccagattggctttcatttgattccaatacaagaacctttaatggtgtggttaccgaaaagattataaaaaacttaacgacaaattcaaatctctattttgatttcattctacaaggtacggatgattcagatatgacatcattaaattgtacctatcaatttgttatatcaaatacaaccccaattaaattggttgacaattttaatctattagctgtactgaagaattttggtaacacaaatggcaacgatggtttaattctgccaccgaacgaagtgttcaatgtcacttttgatgaaagtctcttcgaaaatgctgcattaattaaacagttctatggacggagtgatcagtacaattcccctttaccaagctggctattttttgattcaaataatttagaattttctggtactacccccgtaattaattcagagatcgcccctgaaatgtattacaatttagtgttaattgccaccgaaattgatggctattctgacgtcaaaattccatttagtctaattatcggtgctcatcaattaactacatctattcaaaatacaattctactgaatgtaactgaaaatggtgacttcagatatgatttaccgttaaactatatttacttagatgggtctcctatcaacacagccgatataaggtctattgatttagttaatgcaccaccatgggtatctctttcaaacacaactgattcaaaatacttatttgggactctagctgataatactactgataatcaatttagtgtggcaatctacgataaatatggagatgtagtctatttgaattttgaagtagaatctactactcatgtatttgcagttgcatctttgcctaatcttaatgcaattagaaatgaatggtttcaatataatttcttgccatcgcaattcactgattattcaaatacaaaagtctctctagtatatccaaattctacacaagaccattcttggttaaatctcagatctgataacctaactttacaaggttgggtcccttctaattttgattatctgtcagttggtttaatagcgaaaaaaattctttaagccaacaactgaatttcaccatcattggagtcgatggaacatcgcataatactactttaaaaaccaatacttcttcttctatctttcatcatagtcatcgctcaggaagaaccacgttgaccacatccacaaggtcagctacaactagttcagtatcaaccacagtttctgtaccttcctcaacaaatggtacagtaccattaagttttcaagataaatcttcccacaataaccacaaaaaaactgtagctatcgcatgtggggtagtaattcccgtagtagttattggtatcttgttaattgtattctttttcttatggaaatccagaaaacaagcaagaaataaagaggatccgaatggaccatttgacggcactaataatagttctggcaatgttggtggcagagttaagaataaagataagaatgatatagtcaaagatattagtggcccattattaaataatcctgcaaataaaccaaatcaaacgctgacatctttagaaaacccatttgaagatgatatgaataatttaagtcaccttgatttgactttatcagaatacaacacattaaaattagatcaacaatctatctccacgacaacaacttcaagttctaattctaattatattaatgaaaagacggataattcaagtagtaataggtttaccatttcatcaagagaggaactactatcaaaacctgataaaaatataacacctgcagacgtgaatcaaacaaaaactacgtcgatggtcaatccgttccaaaatagaacctcatccttctacttagatgcattacctgctagtagacaatcctggagatacaatcctaattacactgaattcaatagtccaaataatataaacagagaaagtgtaactactctgaacacagtatcaacttccgaatttttaaatacagaattaaaaccagatgaacctataccgaaggatccaagaaaatctacatttgcgctgagagattcggtattttggggagacaaaaatgaagacagccataaacattataaagataatagggatagagaacctttagaacctttaacagaattttccagcgcagaatctataaccgcgtctaattctacatcttcaacatatgatttcattccagtaaaggatggtgaaacttttaattgggttcatcgtaattctcctagtagaaagcctagtcaaaaaagatttgtgaaattagccagcgaaggtaatgtaaatgttgagaaagctaaagatgtagaaggtcatgtaccagaaatagtttgagctcaacatatattttaagcatttgtaaaaaatacttagaaagaatttattttaacaaaggtcagtgaatgaagggggaggctgaacaaaaaatatattagcaaaaaataaaatcaatttataacaatattctttaattatcgtacggaaataatatactgcattcaacaatcatagaagataagtgatataagtaaaaatcttcgtgtacaaatcactttttttcctacctctttttaccactatttgatattatttaaagagaaatacataaataatttatataatgaaaggtgtacgagactaagagacattcagattctatttaataaataataaaaatataattgacaccttattttatatatatatatatatgcttttttagtctataattatcttcattaaaatggtgtagatcgtatattttctgaagctacatcaaagatatcattactttgtaatggaaaattttccattttatctaattgagctacctccatataattatgtataataatagaaccaatatcacatccaatcaaagatatcattttgatggttggttgtactttatatatatcaataaaataattttcattatcttcattttgacatagagtccaattagtatcattttcaaacttgttcaaatcttctttattatttaagttccatccaatatctttagcatgacctaattccatttccattgtatttataatcacattaaattttactatgtcgtctttaatcttgggcaacgtttccactttattaatcaaactattaagactcgacctgaacgcgtcgaatacttcagtttcattgatttgttcatcgcagttattttcctcttcacttttattattatcatcattaaatttactacgagacttaagatgtttaaattcagtgaaatccaaagtatacttttctaaacaaatatcatactgctgatctaagattaagattgatattttatatatatgtgttatcttagttaacaaatctagaattaaattttctatataatcctgtaaacctggatgccttgtgactggtataaactgaggtaagttaaaaccttgatacgtagtgaagtcaaaggattcccttgggtaaacatttctgtaataaagtataaggttaatataacacttcaaatatactctaatccatttataaacccatttattcatttgaaatggttgcacatataaggtatgttagcaggcttctttacttattgtcactaatctgtattccaataagtagagtcatttcatctttcttctacttgctttgggttagaaaaggaaaaaaaaagaaggataaaataaccgtacgtatacataaagaaagagagagaaatggaggaacagaaatagatagaaagaaaataaagtttaaaaaggttagtgaatttttttatttttttcttatatttctttataaatggtattaaaaaaaactttatataaaataaatagcaataaagttatagagaagaaataaatagaatcaataaaaaaatcataaaatattctacgttttaaatgagtttgattatttttattattatttttattaatgttgtaattattacgataatgataatgatttttgttattactgtaactattattcttattattctgatgattatatctactagtaatatttttactggggttattatcaaccggttgattattcagttttggcatattaatagtatgctggctcaatctatttataaattttccaaggaggcagcaatatcatctaattcttgtttagcttcagcgtattgagcagccaattgttcattcttttcttccattttttccttttcttcttcaactgcatttaatcttctttccaattcttcgaccttcaaatcggcatctcttaatttatccaaggtttccttcaacttggcatcagtttcttctaggtcattttccaattgttcattctttctggtgtagttaccattagtcaatctcaaagtgttagaatcttcggctaattgtttggattcagccaattcagcttctaatttttcgatttcactatccagttgttcatttttgacagtcaaagatttgatttggttttccttttcaatgttttcttgttctagttgcttgaattgctccttcagttcttcatatttgtcttgccatgattcagcttctaacttaaaagcagcaatcttttccttgatcttttccattgtgatgtctgtttttttttatttgcttttttaaagagaacaggagagggtgtgtgtttgtgtagatgtaagatggatgttgaggtgaagctttacttataagagagtaaggtgttgagtatatacagaataagaaggagggtctaaaagaaaatttttggcaagaggtaaaacaacagaaaagaagaggctagtaataggtaattggaagaaaaataacgaaacgaggggaaaggaatgacattatcaagatctatctctttaaataaacttagccctccacaaaaaaaaaatcaaaccaaaagaataatcaacaggtgcgaacaactgcgaacaaacaaacaagatccaacacaacgtcaaactgaaagtttgaaaagttgagacaaaaatgcgacggcaacggcaacagagaaccctcgagaaagaaagaaaaaagaagaaaaaagaaaaaaggaaatataaataagagaaaatagaagttttccgttttcgttattatctgtcttgaaaggggcaggaatttgcgtagggcttaggaaaaatcaaatatttgcaaaacgaaaggttctgttaaaaataaaaaaaatctaaccctaaataaagatgtttatcttattttttttaaaaaaaatttcattactgcctctactgtaaattaatatatatctatgtctggctctaatgatgttagttttaacacaaaaagcaattgtacttccaacgtaggcctctctctctatatatatatatatacatttatatacagtattgagtataaaaagatagatagtgacataacttactaccaaccatcatttttttgttatttatatatgaattctcatgatcaatgtaatatttacactcagctattgttagaatatctttctttttctcttttcacccatacattacactttgacaaaaaaaagaaagaaaatgtgtatgtataaaagaaaacaagttatatcatcgagttatattaatacaaattgttcagtttgattcttatatatgagatccaaccctaaacctaaataattgtacttatcaaaaaagacacaaaatattgttttccacccaatctttttatttttctttttattatagcgagttttgtttaaatgccggaatgtttgaaagaaacgccccctagaaaagaaatatggaaaattaccgtacagagtgactattctcactaaaaataagaatcatacgagaaaaaaagaatacaatttgagtatggcaatgcttttccgcaattttcatcaaaagagatgcatcgatcataaaatatttacataaaacaatgccaatgacgatactctttttaccattgttttcatctctactttgctatctccttggtttgtttatggttcagatacaacagataatataactatatatatctacatatgtatgtatatacaatgtcttttattaccagtattattacacaccaccttcctcacttgtaaaataaaccaaaaaatgaaaaaaaagttgttactattaacacgtttctcttttcatccaacttttatacttactcttattattacttttgttgttgcaatgctttcatttttttagttgtgatgtcttgttgtatctcttggactatcgcagtgtactgaggattatctaaaacccattgattgttcactttaccttttaacaataacatttgaattattgcaaattcgattaaataaaatatctctttatccaatttcttcttccatgatttgtattgtttatcaaatatattccatagcatatcaccaaatgtttcatttaatgaattattattgctaatcttttgattacattgataaattaatccgagaaatgtgccttcaatatatgaagtagttatattggaggaaataaagtttatcatcctatcaaataacaacgtttgtgtctctttgtatccaggtatgaaacctagagattccattgttagattaattaataatgaagatgtatctatattaggtagcccttcaatccttccattttgaacaatcttgtcaataacacttggcttatgcatatccaatacacttttccaatccttagaatccttacaatgactgaccatgcattttaaaacactgcctataatttgaattggtattcttttgttggtaaattttacattttgtccagtcttcaaatactggaatatctcctcacatatgctgaaagtcgtctcattctgtcttgacaaaaatattaacgatgatctaatcgctaactcttcctcattcgcataattttcaatccaatcgacagtttcccacgatagtttattgaatagtttactgacaattttttcaatttgctttaatctagattcatttgtctctagattataaaatcttgtcaagaattctaataattttgtagctctatttaaagatttccagtatcctaacgtgtgtagatcaatttctttctttaaggacccaatatgattcaaaatccttaaaaacccatctatatgaatgggcttctgatggttaatgttaccgataacttgagacaaatcataaaataatttaaacaaatcattatcactaatcttacccaatgtaatcattttcaaaaaatcatcataagattcctctatctcatatgacacaatcacattggcttgattatccttatttattaaggtaattgggtagtctaatgtaattgacctatctgtcatgataacgtttttggtatctgtagtaccatcaggtaattgcattaataaaggaacatggtatggtacatcctcgatcatattttgattttcaatgatctctggtgataaatatttatgttgaatcaatttaatatttttcatatcatctgatgaagtttttgtcactgaaacaattggacaaccaggtaatcttgtccatgagataaaaaaattgatgatattttctgatttcaatctatcgctaatcaatttccatagatccattggtttaattgattgttcatgaaccaagttttgatcgttacacagaatttgaccaaaggcattagacaaattttccatacctattgtcaattccatatttcttagaatgacaatccccttatgataacagtatggatcaaacagttcatttgtggtggagttgaaatcagatttttcacttttcaaatcttgcaattgtgcgatagacaatggttgggtgttgttataaagagtatcattatctaagacaggttttaaagttgaattccaatagagatcatagtttgaccaaagatcattatattctgattcatttgccgagattaaccagtttgccatccatgtagcaaaggattcattaaaccataggtgtttccaatcatcaaatgtgataaaattaccaatccaatgatgaaccaattcatgtaccaacatttgcatgttttgaaatctaatctcaggaataggtaaatgacgaggacttaaaaagattaattgtttatggacagtaatcattgaaaagttttccataaccatatcgttcaaaaatggtaatgcaactaaatccatttttttaccaggatatggaaatttgaagatcgattctactaaaggtaaatatttatgacaaacatttagtgaatgggaagctaattcaattggttcatgatttagtgtccaaatagagataggaattttatttaacgtcttaagttgaatatttttaatatcaccgattgtgaaaccaaataatgaaacaggcagcaagatagtcttttcaaatttgacaatttgccatttatgattactattactattattattagatagatgctcagtagattcaatggaggaaacagacactgcacggaatttatttaaagtttttatagataattggaaataagtctttaaagagggttcatcaatacaaggcaaaatgcgacgagcgaaagtaggttgtaaatgagtagagaaaataaaatcaccattttgaatgattttaaataaaccacgagtcttatcagaagaagaagaaattgtatgaattctacctagataatgtaaatgaagagaaatgtcttgagaagattgcaataactcagatagtcgatcattttgtaaaataatacgttgcaaatctttatcataagatacttttaaatcaatatcactgattatagccttagtaacgattaattgatgtccatttaagattatttgagagaaagctttatcactatgactagatttattccactttaaatctattatcaaatcaccttcaaaattatctttttctggatctattttcaattttaagttataacatttagggatcaatttgttctgtatcaataaggacattttgataaagtataataattattactaatgatcaaaaataaataaattgatacggaaaagagcaattggcctagccttgcttaattttcttcttcttcttttattatttaataatagtaatattgttatttacaaattgaggtagtcgaactgacagtatcagacatagattgtatgcatcaccctcttctagtgcaatgtagtctgtaaagaacactttttgggtgaactatttctcgaaacaaatgctttgcatatcaaaaagttacttttttttcattgctgtcagaacactaaaaaaaaaaaacaacgatgtcgggaatcagctttttttttcttatgagaaatgaaatttcaggcttgaatctgcattgcagtatattactttactctggtaattatctggtactaactaagcaataaaactataagggatatttattgcgcacacccacttgcagagtgtttacaatgtttgctacactattatctttttatcttttcatgccattgcaccttctccattaaatgatacagtgtagggtgaagggttaccttaattcaatcctctaaaagggaaagtcagaaaaagagcactatgtacccttaaaatatgttaaaacttatagaagtgactaataataataataataataataataataataataataataataataataataataataataataataataataataataataatactttataaaatattataataattattcatatatatattccagcttttgtgattgaataatttcaaagttataactctatatgttctttctaaaaacccttcatactcttaaagatatatatatatatatatgtgtgtatgtatgcatataaataattagacttcaaatgatttcttcaacagctctatgtagctatacagttagtttattgaccgcgtatggagttaagttgtgttggtgggatacaaaggatcatccatggtacaataaattttctgatggtgttaacgatgacttttccactttatggaaatgtatagttgggaaaaggaatgccattgagatagaaaaagaaaaaatgaagatacctaaaaaaacacatttctcttccttcctatctacagcatcggataacaagcttctaaatgatcatcacaatcattcgcttagtggtttaatcagtgataaatttgataaaagtcttgaagtggatagaattgtggctgaaggactagaaggttggggtgaaactgctaaagaattgtctcgtgaagaattagaagataattcattaagtgtaaaggaaactggtaatagcattaaagataaagctgcctctttatcattgaacaataggactataaaatcaatcgaagattctttaaatgagaatgatttagctagaattacaatggaacatttagaaggttggggtgaaaatgcagcagaatttgccaaggaagaatatgaagaacttaagaataagaataacaaaaataaataattaccatcatatgtcctatttaatttatatattacttaatttcaattgtttaatttttttcttcaaacaaattatgttcagttttttatatatcgtttattcctttttcttcttctttatttttataatctgcctcctctccttgttattcttcttctccactatcttcaatatgaaattgtttaaatgtgggataattattcttcttactgagatattgtggattcacatgaagaggtactgttgtaggtgtaataatttcgctagttactggaggaatacaagatttcataaactttggatggttgaattcattatataaaatatcagcataggaatataatttaattaatctttggccatttaaatcatcttgattattttcaacatcatacaatcgttcgtaatctttaattgactcacttgaaggtatttcatcaataaagggatacgataatgaacgcttagtaaaagtgtaattattactgttactattggggctactggtgttgttatatcctaaagcaatgtttagacctattgtagaagctggtctatttgaaccatattttacgttaatatcttctagacttttacctgtatctgttactagatcaccaatttcgtctaaatttggtgggatataattttcaaatgtatgatgagtttccattgaaggtaaagacagtttagaattattattattattattattattattattattatttatttgagaagtaatagtagaattattattggtattacgacagttatatatataattaggattacttggagagttagtagaatatgaatatagattagaacttgaaagagaagaagtattactattagaagtatttgaaagatggtataatgaattatttgaagaacttttatttctaattctgttgccaatattgcttttactattggtaaaagagggttgatttataaatagaggtgttctttccacatttctttcaaagattaacgaattattattattattattattattattattattattattattattattattattattattattattattattattattattattattattattattattattattattattattattattttggttatttgtttcatttgtattagaaattaataaaggaatggaagaaaaagaagaaacagtagaagaagagggatgtgagggatgtgaatgtagatgtgaatatgttagtggatcatttagtagagaaaggtatgacacagaatttgggttactaattggaatactcattattttggagtaataacagaaacggaaaaaaaaaaaaagagaattaaaataaaagagaaaagaaaaggaggtgatactgggttgtttatgtacacacacacacacatatatatatatatatagagagagagagagagagagatttatgaacactaacaagtaccttatactaatactatataaatagagaaactcctaaatacaaagagtggagagtatcaaacgtgccagagagcctctgcttttaaatgaccaagtgttagttaattacttatttccctatggctgtttcttataattaaactgtttgcaacaaaagaaccaaaaaaaaaagggctgctgagtaatcataatccgatcacctcctccaattacgtaagatttgttacgtaattaagaaaccattcgtgtgaagtgagtggaatgattttaacaatagcaaaacctccaaaaccacaaaaaataaaaaagagaaagaaacaaaaaaaacaacagatactacaatctcgtacgtaatgatatcagacattggcggtatctataataaaaaaaatttttttttgtgtagggtttgtttttatgaaaaagaaatctttggaaattttctagagccgaaaaaaaactatttaaagagtcaaaacaagaaaagtctgttttcctcaattggttcaacttgtctctccagggtcaattctgtttcttcgcgctgtccccttcctcactcattttttttgttcttcctttcttacagctccttgtgttatcatttcgtgttcaaagctgttgtgataacattgaagaggctgctgtttcggtgtggtccaattgccatcagtagtattttattctgttatttccttcttctatttggagaatatcttctttaatttgaaacaaaactcaaatgatgagcaattattaaattactgcgttatcgtattgactgagtctccttccgtttaagtaccaaggtgtctcaaggaaatcaattttttctatatgtgtttttaaagcatcctgaaagagtttttgtgttttaattgctttctttctccttttctttttgatacttttatacaagcatacacacatatatacatatctgtgtttgtatacttttcttttattattatcgtgtatatagctaaatcttgttgtggtaatgccaaaggaatcgtgctcttctttaaatacttcttcaacttctaagcctagtgctttccatgaattcttttctggatttattgctggttctataacttctgtagtggttcatccatttgatttaattaaattaaggttacaattaaatgcaacaaacggtattcagcagtcttggataaccatagttaggggattatggaagaatcaaaatagattttggttgtctacattgtacagaggtgtaactataaatgcattgggtaattctatcgcatgggctttatacttcggtatctatcgatcttttaaagatcaattgatttcattcactggtggcacttcatctgtttcgctatcatgggtctatttggcctctggaacttcagctggaatcacaacatctatcttaactaatccaatatggatcttaaagactaggataatggcacaaaataaatcgttgaatggaaatgtaggttatgataatataatatcgagtatacgtaaaattaaaaaagatcatggttggggaatttggaaaattggtattgtcccatccatccttggtgtatctcagggtgccgtatattttatggtctatgatagtttgaagagttatcgctttaataaattgaacaaacaaaaattggatactttggagatcttatccatcacttccatatctaaaatgatttcaatgtcgttggtttatccgttacagttgcttaaatctaaccaacaaagtttaaacgctacaaactgtaaagaatataaatacataagacatttgatcccattaattattagacaaaatggtgtgtttggattatataaaggtttatttaccaatttattgaagtctgtaccatcgacttgtttaacgttctatatctatgaaactgtaaataatctctaactgtctctttttcttatccacttctatatatacatttgttgtttctatacaacatcatcacaataaaacctattaatatactcaattacatcattcattaacatattgtgtgacccatcattaccactagtattattattatgattgaaattatttttattatttttatttctttctattcgacgtttctttaatcgaggtccagtaataagtaaactgcctttgtaatttatccttaattgcaataatatattatttaatatcgaatatacttgatcttggttacttatttgaatacgcgaattattcatcattgtatcaatcccatggatcattattttgcaattattgttccttggatcctctgttatcttcattattgttcgtttcaattccaccaaatcaagacaggtcacaatatggattctttcaaatatcgtattatcatttactgatgttatttctcttaattcattcaaagggaatgagttcacactatctatataatatattatagcatcctgtttcaatttcaagtattcatatatagatttagccaactttgatgtatctggtgcaatccacaatgataatattgtctctctcattatctcttttaacctctcatttgtacatttcttctttcttatcaaaaaattatatatttactgatatacttgatcaaataatgtatataacagtagatacattctttttttaccttttacttctcttaaattttaagtctgtatgttggttttcattatttctttatttttaacactatatccatatatacatataaatatataaccatatattcatctatccatccatatatatatatatatatatatatacatataattctatttagatatatctgtcaaagcttcttcttttgtgattttgtttcttctttctgttttgattccattttctctgcttctaatcttttcctataacattcttgataatattccggttctctttgtccaggaaatctggcatcacctctagccataaatatacacaattctctaactattataccaccagttttctttaatttaatcaaattaccttgataccaattctctaagaaatcttgtataacattatcatttaatttccaacatgatacatgcccagaattcatggtcttaacaaaagttgaattaatcgaaagattatgtctaacggaattttgccaacttgttagtgacatatcataaaaaggatgtaaattcgatatatattcatagatctttgataatggcaaacaaccttcagggcttgacaaaatggcacgtgtgatcaacattgtgtatggccaacttggtcttttaatccttatatctttataagggttagtagcattagtagtagcagctgtagtagctgttgaggtatttgtcttggaaataatattggtagcttctttagttttgtttattttttttttaggctcatcttgattttcatcagaatgtgtacgtttcaatattttattagaattcaaggtggaattgttatttgtaatctgattagtactgtttttaacagttgaacccgcagaatttattgtattgctggtggtagtagttttggttgccgtattttttttagtgtaaaactgaactgctttaaggttattactactattgtttgtactatcattgttatttaaactctgattattttctattacttcgacggcattcttatgattgtttttattgttgctgtcaggagaagtggaaatattagtaacactacaacttttatcacccggttgtttttttggagagatattactattaatagtattattgaggtccatagattctccttcattcttattattttcagtttgatgttccttttgaccattattaatttgaagattcttgtctttaacatatatagaggtgttgattatatctttcaataatggattattattgccatttaatccatacagggtggtcaattttggaattaaatatgaatagataggtaacgataaaataggaaacggattattctttatgtataaaatcatctgtgaaccaccaacatcgattgaagttcctgattttaatggaccaatggggacgttcaatttactatttggcacacgttttaagtttattttacaactatttctacctaacactgtaatgtaccaaccattttgagattgatcattctgtgaatttttcaacttatgtattattatgtgtctacgcgatacagttttatttggacccagatcgatatctattggtaatctctttattttgaaatttagttgatgtaacgatatagtttcagggtttgtattatcacaatttctaccaatggttatttcaacagcattattaccactattattattaggattattgttgtcgttattttcataattatatgtccaattttttccataaatcaatatcccatcaccacatttcatggtactagagttatcattttgtataaatgaaaaatttctagaatctggatacagataagataccataggcataggattagcttgttttaatgcatttttgatcgacttcattaaagctatttgattatcaagagtatatgtggataaatcagttacttcatgaggtacaccatctttagcatctttagagtgagcatgtgatatatcattgttgttggtgttagggtcagtcatctgttatacaatatttgttgtgtatatttgtgggaaatatgcaaatatatgggctgagtatataaatagataaataagttatttcacctttttcttttcttttcttttcttttcttttcttttctcttcttacggttagatcaactaaagttaactttccatctcacaatgatcataacagatagaagtcagaaaagaatgtgatttttggaataaacctcctcgttagtctgtttgaaaaggatatgaatgatattatccaataaaaaaaaagagtcacattaaaaggatatcctaggatacgtttaactgaatacaaatatgtagtctatcatcttcggtgatcaggtagcagaagtttttgtggtctttcagcacttttgctactcatctttaaattaaatttaattagtgtctgaaataggaaacaaatctcaaaagagaggaagaaagaaaaaaacaaataaaaataaaaaaaaaaaaacaaaaaaaaaagagaaaaagaataattcctaaggtagcttagggttttattaacttttactgaaataatcgctaaccctttataagcaaatacaggtcttggaaaaatcttgtttcccatagcaacatagcatccagacttccaatgcttctagaacacaatttctttattttctttttttgttttactgcctttttttccatcgtctgcttctttgattttaatatttttttttctttttttggtttgaagaaataagaaaaaagcgaataagagtgatgtcagtagcacatgcgattcagttcttgattagtaaaatctgtaaagaagaggtttaactgtacatctaggtggcccttacaaaacagatgataaaggaagtgatagtcaacatctgaattttaggttttatacttttttatcgtttaaaatcattgacaactgaccattgaatatattcaacaaagacatcttctcttttctcacaatttttatttatctattgtttatcgattagcatataataccatcattaacgtgatcttagaaatttactaaatacatatagacataaaaaaaatacgtatctacgtctatctatggttattttttgcatcatatagaacaatattttcatatatatatatatatatatacaagcatatgtgcaaagaaaagttatcctgattctgagatttaaacacaagaaatataaagaagtcaaatttttttaaaaaaaatatatatataatacactatcattaaataatgtctaaagatatatttccatctccaactaacccaccacttcaaatagcattgcaactacaaccgtcaaatgatcagtttaaaagaagaagggttacacgtgcatgtgacgaatgtagaaagaaaaaagttaaatgtgatggtcaacaaccatgtattcactgtaccgtctattcgtataactgtacatataataaaccgacgaagagaacttttacacaaaaacaacaagattcaataataaatagtacaactactgacacaactaacaatgttactactattaataataatataacaaactacagttctacttcaaatataaatagtcctgttacacctgcaactgtagcggccacgctatctactatcccacatacaaatgttatcaatctgaatactaactcaactagcattcaaaatttaccaaatgatacgaatatgaatcctaatgctgtgaattctgtagacactttcaatttagattctccatccagtactattttgaattcaaatatacaaagttctactgtcactagtaacaacaacaatagtaatacaaacaagagtaaaaaaatctaatgtgacaactttgaaattacaatcacaaattaataaatatcaacagctttttaatacattgctaccaaacatgcctgatatagacactattgatataccactatttttacaaattttacgtaacttcaaggatgattctgatactttcttagacgatgctatcaaggaatattatatgattgttaatgatactactactactaccactacatcaaatatattaacatcgccttcatatcaaactccaaattattctaacccagatgacatgtcaatatccaattctactaggaacactatcaatgataataataatcaaaacgatatcaatagaagcaacagtagcatatctttagtaggctccatgatgatggatccaaatgacaggattaaatctatccaatattactcttcccctccactgttacaatctattggaagagaaattaaaattattttaccaccaaaaccagtcgcattattatttgttaaaaacacttgggaacattgttgtgtattgttaaaattttatcatagaccaacgtttttaaaacaattagatgaattgtataaaactgatcctaataattacagtgttgaacaaatgaaatttttacctttatgttatgccattatggctgtaggtgctctttttactaaatcaattgaacaaaacaacaataatcataatcataataatactaatagtaacaagagcgctggcaatgataaaaagaatgacaacaataaggtaaataatgtaactactgttattaacaataataatattgtttttatggatagtaacaataatatcattaaagaatcaccttccgttaacacacagtggaaagaatcaaatacagtgaataaaaataattttatgcaggatgaaggttacaaatattttattgcagcaagaaaattactcgatatcacgaacacaagagatctaaattcaattcaagcagtactagcactttttatttttttacagtgttctgctcgtctttctacttgttactcttatattggtgttacaatgagaagtgtactcagggaaggatttcatagaaaggtacccgataattcaccattatctttaattgaaattgaatgtagaaaaagattatttttcacaatttataaattggatatttatgttaatgcaatgttaggtttaccaagatccatctcacctgaagattgggatcaaacgttaccattagatatatctgatgataatattacagatgataaaatatactttgaaagacaaaataatgtattatcgagtgctggtatagccaattatcacacaaagttactatttattttggattcaattatgagagaattatacccgatcaaaaagacaaataatgtcatatcgcataagactgttacccaattagagattaaattaaaaaattgggtagattcattaccaatggaattaaagccaaatgccaaaacaatacccccaaaatatgaaagagccaataaactattacatttatctttcttgcatgttcaaataattttatatagaccattcattcatttcctttcaagaaactttgtgtcttctaatactgataaattatcattacaaagagctaataattcaattgtagtcgctagaactgtagtaaggatggcacaagatatggttaataaaaatttgatatcaggctcatattggtatgcatgttatacaattttttattcagtagcaggtttattattctatatccatgaagctgatttgccagataaagatagtgcaagaaaatattatgaaattttaaaagatgcagaatgcggtagaaacgttttaatacaattaaaggatactagtatggcggcaaatagaacctacaatattttgaataaattgtttgaaaaattaaattccaagaccattcaattgtcagcaaaatacagctcatcctttactcgaaagcctccattaaatgagacattcagtactgcatcgtcagatattagtcaaacttctagttataacgtagagaagtttgttaaagatgttccaacattttctgactacttggaccaaaatatctcctctgattttgttaaaagtattaggacatcatccacaaattcagttaatcagtttgctagtagtggggatcttattacagataataatgtcattaatacaaagaatgattatagtaatgatgatagttctaaaactacaggcattaaggctgtggtcgataataatgatgatttctttgttaaaacagccccgacaaatagtaacaatatgtcaggtccaagtataaagaaggaacaaattttcgatttctcagattcctgtattacaaatccaacagttagttgcttaaagaataattctgtgacccaatctggtttggatacatctttgttaatctcacaaaatgttgataataataataataataacgagcatactgataatatcggttcggtaaaatcagaaccattaagtgatgacaatattggaatatttgatgttttcgataaactagatgcccaattatttggtaaagataatgtagaaagtcaatatcaaaaccctgcaaattttaagtttgatcaaagttaaaacgcagctaactgctagaataatggcgtctggttatagttatcttctatttgtatatcctgcttgcagaatatgattttaatattttactaaaatgtatatacaggtgtatgtaataattaatagttaataattaataatcaagaattgactttgcatgatagagagaattatatatattcgcatatgtcaatgtgtcgtattgaaatatgtcacttgaaatcaaatgcaaattttaaaactttaacttgagggtttgactgatttgagagttttctataattttaatagctatataagttaattgattgctttctatataatgttacatcttaaaaccaaatatatttcatcttagaattccccctaattcattggtagttgtcattgttgtagtagtatcaatagaagcagatctcgtgcgtggcatatttgtttcagtgtgagaaaccagcatcgaaggattatttggttttgtaaaaaaactgtctaaattatctagttcagcccacatatgacttagagttggatctttctctgatatacctgcataagattcaatagtttccattctattcaatccatcatccaaatcttggtgaaattcaactggttcgtcctcaattatatttggttcttgtggaacttcttcattttctgagttagaagagcatgtcataaaaaccgcatgaacattatgtcttgtcatagctgctgtcatagttggcattggaactgaccatccactttcttctggtaatccaaatagtgtggttgtgttattactcggtttctttgtattttcaattcccatcgtgatacgaagaatgtctttatctaacttgcttccggagatttctgaaatattatctatgacatctagtgctagttgttcataattagttgttaaaagtcgcagtaacggtgatattaagtcagcacctacacctatgaattcttcgccagttaagtcaacaagagggaaaatatattttaaaatttctactgtctcttttttgacccaatctaatttattcaataataatcccaataaaaatactaatgtttgtgcagaatacttagggaaatatgttcttgctataaagttaacaatttgacgcagaaaatcctttttagacctaaatttattcttagatagagaatcaataagtcgagataatgaaggctcgttatttgaatcagccaaagatattaagctatcagcagatgtctggattgaagagtaatcattttgatccataacatataaaaaccttggtaaatttgaaattaaagcaaatagtaaacgagattctggatctgcaataatacgactaccttttaatagatttaatttatccaaaaacttcattgtaatatcaattgagtttgaagaacgaagaccaatcatgacaatctgctgtaaaccatcaaaatgaccttcccaattagaaggaaaggtagcaactaaacactgaactgtatcaggtgagtctaaatcgatttttgaaaaaaattttgttatgcatgaaagtgcttcgatgaactctggctcatggatggtattaagacatgcaactaatgaccaaaatagttgaggaaacccaattaagtcatttgcatccaattctgctgtaacagcgtttaatgtcattagaatttgcatggcaaatccttgaatatcagtattctcatctgcaattgtgtttgataacctatgtaacatatccttgagcataccctgatctaaaaaggtaagtaatgatcgaaatacttggaaagagcggcaagccacatgtctcacagagcaagtagtggcccattttaaagcacatctttgccagtcaatttgcaaggtgtcttgttcatgtaaaacactaattatatttctaatgagaaaatccatggtccttggggatctcgcaccttttctgtcctttactaaattgtcataaacccatctaccatgtttatttcttaacaaagacaatgtttcttctgttttttcgtgattgggagccaaaccaaagatcaaattgcaaattattcgcatggcactgtcttgaattagaggaacataatggtccaacaaacatatagccacatgaagcaatgttggaattttggcttgtacaaattcattaatatcagtaagtagatttactaggaaaatgatagacaattgagctttagagaacataattgaacggccagtataattcagactttcccagatattagcaacaaaacaaaacttggtaacattatctgtagtatcttcatttgttacctcaacatttggaatcatggctttaggctctaaattatttaaaagtaagtctgtcaaacctaaacctccagatatattggcaagatatagtattacatcccttgctttttcaataaaatgtgggtttttatatagcatcgattttatgatgatgtagtctacacaaacatggatattttgaaatgaattacctctacctaatgaaatccacaactgctcgacttccttaggtagacgatcattcaattcaatagttacataaaataaatttgtcaaaaccatctttgtatctgcatcatcagttgattttaatgtaaacttgtttacccatgggaccattaaaattagtaggtcctttttaatagcaaaagggaagaattttaatatcttgatcaaacttgagaatatgcacagacataaatcttgagaaagtaattcgacatatattgaagatatttcaaatgctgttgctttgtaaacagattttgaggaattggtaagtctttccttaaaaacttttgtatatgaggagttgtgaactttagtctcaacagctgataataaatcaatagcacacgatcttgtatcttctttatctgatattaatccatacagcccaagcgacactaattcatgttcttctaagattaaattgtctagtttcatgatagatttacataaggtaatgtagtaatagacagacacaaaagagtgctcatgtggtgatatgcattgaagaaaaacatctttaaacaactgcacattcgttggattgttttgtaaaagattttccaaagctctgacacctaaagctctcacattttcattctctgcattgaaaagagattcaacccaagataaaagaccattgatattgaaggaaagaactataggatggtttgattcatcatatagtgtgtgagtaattggttcagaacataagataaccatagcctccaatgtaattatttcaagacgacttctttggaattcaataccagttgtaactgcagttctttccctaacattatatgcctgattgatcatgcgattatacctttcaatagcgatgcggctattattaccgtatccacaccattcttttaaataattgaaacaggatactctagcttcaaagggaaacaagtcgtcaatgtattcatttgcacgaatggttgaataaaatcttgctaataattcggcaaagtatcccctcaaaaattgataatcgtaggagttttggacttcatcatgctccagtagagatttaactagtttcaaaaacatcgatattctccttaaaatccaaatatctttaagaatacttgattcctttaaaaaccgagataaaatcgttataacgtggaatatttcgattcttgtctgtttatctgtcacatcaatatcccatgtagtaagcgtgtcttcaacactctcaataaatgttctaaatatgtttatgttcattgcacttaacccaacaataatagcctctcttacaatatttctttttgcatttagaagtggtaataccattttaaatatggctttggctgacttaattttttgatgttgtacggtgaagatttgctgactctttttccttccatgtgatagtttgggtgacggaatatgtaatttctgatccgtagtagaagttaatgacgtgcatgccgcaattaaataaagtttccattgatttacaatattttctggaagaatattagttggtttaaaatcaggatcatctgcgatctttaagattacttcatgtacttgaactaacctaatacagactatagaacggcacaaagccattgttattggtgatgatttgaaaatttcagtcaagagtttgggaaatattctttgccataatgcagcatctatcccataagatgactcggctaattttaaagctaaccctttcttatattttgcactcaactttaaaagacgacttttctctgctgtacttaaagataatttttgtggtcccaataatgataccacattaacttctcctaagaaatcaattaatctattacctctatctgctgcaaaatggagcgaggatgatcttgaatgaccagatgacaagcgacctgttttttccgtcatggcttcatcaaattttgatatgattcgtaaaatcttaattgcaagttttcttaatcttgaattatgagcacatagaaaaaaagaccatttccttctacctcttcgattacagtaactgtattcttccattcaagtttctctgaatcactgacattatcttggtttacatcaggacttaatagacgaataccatctagcccaatagttttttgtttttcttctgtttgcgaagaagtaaattcttttaaccaacattctaataattctacatataataacaatagagatgaatattcattagaggatagatattgcatattgtaacttgattgagtcttctcgtcaaaatcaaatgaatacttagcaaaccatgtaatgaaagtatgtggattttttttggaagcaagagcttttaaagatcttttggcggatttagcgatggcttcattggcatgaactgcatttcttgttaaaatttcaattgcagatttataaggaatctttttagtgactgaaaggcaacatggtacagtttcaatcacttttgaaaataatataacattggaagtattcttttgagaaccaccttcattatcagtagaaaaactgaaagaaaatgagccaaatggggtagatggttgcttttggtgggtgttttctggagaccaaacctcagacccaatatttgaatccaatagtaagaaaagtttataaatatataaacatatttcttcgtgagtgctgtacaatgggtcactattgattattgcaattcgatttaaatcagtcaagtattcttttgctgtggcgcctgggaatgggggttttttatctgttattaataattttctataagttgtaactgccaataataatttatcataattattaatatctaagtttacaccattgaaagattgtttaagtaatgggagcatggcgttttccattaaaaattctggataagggtacccaataaagacaagactatcagataacggattgattagtgagaaatcgggagttaaccaattttcttttttttggggtttaaatatagtcttaataatgatgttaacgtttttattgtattgttcaacgtctctgttgaacgatatagatacacccaaactaagcaagatagacctagtgcatagatggctctttccgtgatatctttggttttgattttatcaatatttgaggtaagtaatttcatccatctttctgtgaataattgagaaggtgatacacacaagattgatacactcagagtaaatccgacagaccaacatttcgtatttgaaattaatgttttggaacatttatataaaagctccattgcttcaatccaagtcggatgatttatttctacggtgactacgtcagctaaagataataataattgagtggtgacatctgcataggctattctgattgaaacattttctgttcttgcaaaaaattttgatatacttttcaaaaaatccatactttgttcaaaattgtcaattggataatgtttcaatttcaaatacctcatacctaaaactagtaaatgaacatatggttcgtcttcaatgggtattaaactagggaacttttctagttcagcgataaatttatcacttacagatacaaaatggtattctgacatacaacctagaattttagcgaaagaattccagtttgaagattttatgatacttgaagaaacagataatggatcagtgatttttaactgtgcaaagatgatttcttccaacttattgtttatgtgttcatcagagtcatgtggggattgtttaacgatttcaatgagcactctacaaagaatgtatatacttattaatgatttcctgtttgcctgtaacatttctattctctttttttccactatattctgtagctcaaccaattttgttgtatcgttataagttttgatttgaggagaagattttaaagagacgactctctttggaatagataaagaactacttgtggatatttttcttagactattagattttattagacgtggtttattattaactgaggaagagttattggtagcaacagtactattagtggtagcgcaaccattcatagacatttcattttcaaaaagctttagtttattctcaaaatcttgtgagattgagtttgatatttcagatttagtctttcgccaaaacatcattgcatcaataaccggtttaggattttttctagcaatatgtcctagagatccaataattttatcgaaatcagggtccacaccttcacttaaaatattgtttataggaggttcagtatctaaaggatattccgagcataaagttaatttttcctctgcttgacgaacaaattttgtgaaaagtatatgtaaggcatattctgaggggcttttttttctgttgctagttcgtgtcttaaactattaacatattctgttggagtaggggtagtatcagtattagtattggtggtggttgtttggttaataggcatgataacattgtttataggtttctcatttgatatgatatcagaattattagtaataatatttgtagtagtggttatgtcactattattttgattgaaatgtgcatttgcgataaaatgagaagattgtatattctgtgattgattatggtgtatattaaggtcatttgagtaggatgctaatacagggtgatcacttatatttgtagaagaaacatcattatttacctgtttaacatttggtggtgcttcaataggtgacggtatatttattgtgggaaaatctacaatagaagattgtagtatttcaccattattagtatttgtagttgctgtaacattgacctgattattggtattattgttttgcgggataaaaggatattgataactatggttataagagtaatcagatggatgagtccgtatgttatttgcagagataatattactttgatctgttggtattatattattttgattttgtgattcttgaacaaatgtattttcagtatcctgcatgtttctattatcgttgctatcgttattattattatcattattattattattatcattattattattattattattattattattatccgttgacgatgatgatgatattgttgttgtcgtcgtcgtatcagtaacttggggaaacacaaagtttgaattcatactacgattgatatatgtataacaatatgtatatgtgttatttgaaagtaatgttcttcaatgatgaatactagggtataggctgtaatataaaattaaaaaagtgaaaaagcaaaaaaaaaaaaaagatctttttcttttaacacaactttgttttatataagcgcttatatgtataggatatgaaaacgtttgtttctttgttttgataatttggttgattttgatctattcaataatactatgttcttctacaaatatatagaacgaacaaactccataaaaaaaggggggggatcaaagaaagggctactggttaactactaaagtctataaaaatgcgcatatgtatatacatagatacaagttctctttagtgtatattagattattttattttatttagtttagtttattttagttttgcattcggacaaaaatagaagagagagacggcgttgagagacaaaaagaagaaaaagaaaaaaaagaaaaaaacaaacaaaaaagcaaacaaacaaactgaagatgtcgaaatggttgtctgttggaaaacagagagatattgaaacacatcaaatcgtatcaaatcaaatcaaatcataacaagtgtttggatagtggcagtgtagttatacacttgtgtaaagtgtaagatccttcgtatgagggagggagagtgagaacgctaatgtctacaagcaataattagaaatggtttgtcctatagaaagagcattacatatgctataagacagagtagtcttgctggatccagatacatcgaagacagtatatagatacattaaatacaagattcggcacatggctacaggatatatgaatgaatagaagataataaaaatgaaatttagaatttttgttacagaatttgtagtcctttaattggaagctattattttctttgtttgttccctactttttgcacgtgaatagttctctattaaccacattagggagattaaaaactatttttccccttcttaacattatttaaacacagtttagtattgaatcttttttgtttttgttttgcatttccctctctctctgtctctcttgcatacaaacatatacacaatttggacattttcaaaagcttgtctgtggtatatcttaaaataaaaattttttttttcttttactattgtcggttgtaatttcgttgctgcagcttttaaatcaacaaagacaaaagaacgatgaacgaaaaaaaaaaaaaaaaaagagaatagaataaaatctcgtgaataaaaacaatgtatctgtgctgtttcatgtgaagttatttacccccgctcctaacaatttttttttcgtgcttatcagcttgttattactactactactgtttatttgcctatctacctacttgtgtatatatatatttatatttgtatatatatatatatatcttcttaatgcttggacgagtcttgaatatgaaaaaaaaaagaagtttgacagatgattagacatttttcatatgttccaagggatctctttttttgtgttgatgtagacttttcttaaatgttttgtagcgtcttggtacaccgttcgagttaagcatctctcccaggctgaaacagagcaaataatttttaatatgaagtacaggagatatttagctcgaaattcttcagtctatttatgtctattcttattatgttctgtgtttgttcttgtgtcgttgagttatttatacaatattaattcaaatactcaagtcacatcatcactatcttttttaggcaatgaacaaagaagaccaagacagaaacttcacagcagaaaagagctagtgaatgtcgatattagtgatatgttgttatcatcgtccaagacatatgataagtatctagaggcagaatatggtttcaatgaatctatcagatctaaattatatagcaataatacccttttcggttacgtaccaaaccttgaaatgacatattcagactcatccgataaaattaccaaaaatcataaggatggtgccaatcgtgatgataataaattacaacctttcaataaagcttatgcaaatttattagagtgccaagatctacaatattcaaataacatcgaatactctgtgtctgaccaaaatttccagattgactatatcaatatgagaagacagttattggctatggactctcctttagccaaggaattcactacaaacgaagaagaatcaaaaatgtctgagatggaaattattgagaagagatggttttctttcggtacagcagcggtatggttgaaaaaggaacaatgttatgttgcatatacaagaatgatctattctaggcatgagaatagaggtagttcctatatatccgtggttgtgggtcaaatgtttgataaggattggaatgagattaaagggagaagaattccttttagagatgttaaaatgccaaaggaagtgaaacaattggttcaatcacttaaaagaaagttagatatatcagcaaattgtgatgctttaggacacggtactgatgcgtatgaaaattgtgcaactgagattaataagaatacattcaaaattagagagcaaattgataaattattagataaatattctattaaatatccaacagtcgttaatataccatttattatgagagagcattggaatggcccggaggatccacatgtgattttaagacaggataaagatggtgaagaaccggtcatcattgttaatatgaattcacacaaagatataaaggtgcatgccatgatgccacataggaaaatcgacccttgtgtaatgtttgatattgaaggttacgatatgaaagggtttgaaaagaattggtctccattttttgtccctgagagagtacaatcaagtgataattatccaggttatatacattttgtttatgactacagtccattgcaaatcattcgttgttcactattaacaggaaaatgtaaaatgatatttaatgcacaaactgcaggacttgataatggcaaaggctacttcgggatcattagaggtggtactcaatatgtttcattacctaatgttttacctcagctagaaaatacgcatatttgggtaggtttcgccaagagtcatgttgataattgtggttgtggtgatagattttataggcctactttaattgtattagtcgaaactgatggggtctaccacttggaattggttacgccaaatgttgattttggtaaacccataatgggttggaatctaaaagataccagttgcagtgggtataacgttctttcaccaagttctattagtaactgggcaattttagatcaagatccaataaccaaacgatttgaagactacatggtggtgacatttagtgaagcagatgcaatttcaggtagggtagtcattagaggaattttgaattatattttacaagtttataataaaaagaaagtaagggaaacattacttattgatgaagagacagttaccattattcaaaaggcttcctattgtgttgcagaaaaatgtaaagaagaatgtaaaaggtacggtatcgatcatccagaaaataaaaattagttattcttctactattattgcagatttactttactccattgatattgattaaaaaattaatattaggttatgttatatatattcttttatggaatgtacttaacaaaggtttgaggtgctttttcttatttaatcttaagggtgtgtaataaatacacatttctaagcagcatatagatagtgtacttaataataatagtaataataattgtaaccaacaatggctaagacctagttcaaatgtctgacaggcttttggattgcatgatagatattttttatcaattaattcctgcgatattggaattttgattggatttcaaaaaaagaaaaacatcaattttcttgtaatgaaaataatatttaccataaagttattattccatgtgagcaaaacaacaagtttgtcaaatagtatatgggatttaaaaattaccaacatttttcgaaatagtttgaaaatagacaaatgaacgtattaccagtatattacaataactacaatagacatatctacaataaccttcattcccactagctctgctaaagatggaatcactattgaataaatgttcgaaataatttggttatagtaggtaatttattttatcataaagtttttgatttctttagaaatagttgataaaagtactacttgttgtaagctagatgaaagcagtttgttgtcaatcaaaccaatatttgcataactgaattttttgtttatcaattttggaataattgttctttatttcataggtctatttgaagtgtgtgaattggatatattcttaatagtatataatattaacgtaaggttctttctccttcttctttatacacagtataaaaataatgatatataaaaacatgtaaataaaataaaaatgttatataagaaaatttttaggttgatatatctaaatagatatcgattaattggttgttgaaactatttggtaattgaaagcttatttcgtactattgattctggttttttatgtagcaaattctgggaactttcctgcccattataaaaaataatatttattaaaatttatacattctctgaaaataataaaaacaagattgtttaattttggatttatgtatataaaaacgatgggtcccaaaaaacactattgtcgttatttataaggtataaaacataatttttctatgagtattaatatgtaagagttgttgtatataagtggataaattatatcaattagtttaagtataaacactcttacgtaagttctatatatcatcaattaataaccctgatatagtattattacttcttgttgttgttgttagtcttgtatgatattaagagttacttcttaatatcattactaagatgtatttaaataagatgattacccctggtatatctctcaataatcaaaggcctcttgacaagatcagatatgattatcgctccctggaaatcctccaatcagattcaatacctcatacgagccgttgcacacattactgtaccaatcctccacccagccacttaggcgttacccttggaactgcgtatccactggatttccagttagattccttacataataattttaattttactttttttaaggttttctataattttatttagataagttatcaaacgtgacttcttagaacacaaacttaaaatgaaatactttcttttttaaaatattgaactccaaacaaatataaaaataaaccaccgtctctctttccctttttagtggcaccgttttcagatttatttattaataaacacaatgaataatcttacataaaatataataaatctattttcagaaaacttgtgtaaagaaactgctggaatcaaacgttctagaataaataatagaccaattagattttagtaaacattaattgataagcaaaaagtgaaaaacgtattgtttgcttatcagtagacgtaaacaaacttcatcataaatttagtgccgtacttagacgagatagaccaaatatgaaaatatataaagccaacatttttttcatatcatgtttcttcccttgctcatcttctatattttatcattatacattatatacataaataaaaaaactgaagaactttattataattttgtatactaaatctatctaatataatattgagaatacttactatatatccaatgaatacaggcgctcattctcatcaaaaacccatgtatatttctaaattttttatatgaattttttctttttttgtaacctaaccagatttgacacggaaaccaaaaacacataacaactgagaaattggttcttaaaacctacaaaaattcgtttttcaaaaataactaaaataagaaaaactccgttgttatgatatttcaaagatttttcctctttggaatacacaatattgtttagaaaatttttttcatttttttttcccaaaaataaaaaatcagctaaattttctattgccctagaatcaaaaatctttctccgttttgtttacattttagagatttttctcgaaggggttttccatatttgtctgtttctaaaatttatatagcatttaacagtaatggcaacaactgttgttctgatagtatacattagaagcgatatcgttactagtaaaagtgtagttgaatctttcaaaaatatcagaaaccattagtagaaaataattttttatgatataagggaaatcagccattggattttttttgatattctatatttctttaaagtcaaacttatattacttcgaaacgatccaatttacattattttctcttctttttctcaatatacgtatctatctgtgagacaattattattattattaaagataacagtatatattaacataatatatatataatatcttttttttgaaaaaagtaaacaatagaaaaaatttaaatgtctattgatccattagagaaatttcatttacaattccaaagttttgtagaaaataatccaaatgtaatatctgctgctagagctgcatctcaaataccagaagctgctaaagctgtaatcatactatcccctttatcgttacaacatatctttagtagacaatgggtctcaaaatcttataaaaagactattgtggagagacctgaaagattattagcatcttcgataggtattgctgctgcaataaccatgtacccggcattattctccttaaaatcttcttttaataggatgggttcattaacagcaccacatgtaacaaaagttcatgcgaagagttggtcatatgaaattactaaactttgtcaagaagcaagtttcaaactatcggaaggtcaaattgaagttcctgacgattggaattccggtgatatttatttgagcccaactaccattaatgcattgtgtggtactattggtgccatagagacaggaatagatacaatcttttcaggcccatctcctgaacatatatgtaatagaactttcgttgctatacgaccacctggacatcattgtcatgtgtccactccttccggtttttgtttattaaacaatgcacacatagctatagaatatgcttttgataaatatgatgttacacatgcagtcatcttagatttcgatttacatcacggggatggatctcaagccatatgttggaaaagagctggattcaagcctgacgacagcgatagaaacgaacacatctcaaactataagagcaaaaaaaatataaaatatgatgagctaaacaataatatcactgataataaggttgattccagtgaaaattataatgacgacaacattgataattataatgattttggtaaaaaattggccagatttccaaaagttgggtatttttcattacatgatattaattcattccccactgagacgggctatgcaacaagtgaaaacataaaaaatgcatccacttgtattatgaattcacatgatttaaatatttggaatattcatttatctccatgggataatgaagaggattttatgaaactgtaccgttcgaaatataggacattatttgccaaagctgatgaattttttaaactttcgaaacaagaaatgttaaagttaaagaaaccatttaagggactagtggttattagtgcagggtttgatgcatcagaatatgaacaacattcaatgcaaagacataatgttaatttacccactgaattttacactatttttactaaagatgctttaaaattggcacaaatgcattgtcaggggaaagttatttctttgatggaaggtggatattcagataaggctatatgttctggtgtatttgcacatttaatcggactacaaaatcaagattggattaaagaatggggatcagaacaagtagtcaaagaaatatctcgtggatgcaaaccaaattggaagccatataagtctaaaaaatctaaagatgtaattagaatttgggcggaagaagtcatcaaattaggtagagctatgatcccagaatttgaagatgtcatatttaaagaggctaatccctctatcccttcaaaaaaatccgaaggaactattgcacaaagaattagcaggaataaagttcaatctcaagaagctaatggaaaaccatcaagaagattaaaacaagatataccatttttacaacaggaattttctagtgaggatgaagaagatgatgcagattatgtttatgatgaagaattgaataaaacttttaatcaaacggtggaagatatcacaattgatgatatatctagacatttagagactttggaaattattcaaagtgatgaagagacggatgcaaaatatagcaaacttgatacagtacaaaaacaaaaacattctttttccacaaaatatcagtataaagctccgtcaaattttacaaaaagacaaataaggtacgaccaaacatcaaatccgtccttacaaccgtatgatgacactgatatatctatgatttcacatatctctaccagaagacatactacaagaagtggtagaaaatggtaattattatatttttacatcacttgggaaaggatttttttgtattttccttcatctaagcattaacggttattcattaatttgaaaatattatactatttattatagcttaaaatatcttatattagttttatatatgtacttatccatatagttcgcattttaattttatatatttgtaattataaaaaaataatggaataatttaatggtataatagttaaaaatttattatcaatttctttttattattacagatcattattaataattatttatattctttacatattgattgtatatgagttacacatgtctcttgtaatacattatccaaaacagttttttactttatatattttcgtattatttattcaacagataaaattataattgtggaatatgaacatcaacctgctccctgtcctcgtcaggagtaggctcttctcctttaaaaatacattggaaatctacaataaatggctgcaacataactattggaatatttaatgtgggtgaaaatacaatacaaagatttcttaagttcattttgttatatttattattatcagcaattctgcttaatagttcaaaaagtgagtacatcagagatagatttgccctaggaattttatttgtttcgataatacttctaaatcctaatgcaatctcatgtggtcttgagtaattttcatcaacaatttgtttgaataaagagtattgctcatctccaaaaattaagtgaggtaaacttcttaaataaagtttcaataaaccagacacagtgttaacacctacaaaagtatcttcagtatcattttcataagcacaaagatcgaaatcatattctttatcaaatctttcttgtaacatcttaataagtgtacttgacccacttaaacggaaaacaccttcttctcgcagaccatgattcttgtataaatattctaaacatctgtaaacaacactaggtatttcatatttgttttggtacgtatgtgaactcaactttagacattcatccaaattagatccaaatacagttttcacgacagatgattctgtacttggagaatcaatcgttatggatttaagcttgtcatcgacaggcattaccgtagaatcttgagatattattgtaacagcttcaaaatctaagttgtcatttatattttgaacatgtggggaggatgtagaaacatatgatgtcatcggatttaaattcaactttttaaatggaaatatgcttctcatttttaatcttcttgcttctcgttcgtctaaaccaccattctgatcaattgtttgttttggtgaagaagttgtagttgtacccatagtatattggttatttacaaatagagatgatttttgttcaaataaattgctagtagaatcaatattgttatcaatcgtgtttgctgaagacccactctttgctattgtgttacactgatcgttatgagtatttgataagtttagccaatgatttgaagaattgacactggaagaatggctgtgtgacatataatttggaccatcaataagctcatttatagttgatatccaagattcacgttctttagacgtttcagtgcatatataatatttggaacttgaagataaactactttttttatgttcactaatcataaacccatttttggtaccaaacttgtcatcaggtaaatttggaataatttccatagtacactgctttaacttgataatttctgttgtttgatctccttccgataaatataaggtatcaccatttaatactgcatatttgattttccaactaggttgattccctaatgtctttttgggtcttcttaccatgacatttccctccttgatagtatcatccattaacattgggtttactactgtatcagtacttaaaaattgtgcaatttttagactgacatttgaaggaatgtcaggtatactaaatatgctttgaaagtatgaattaagctgttctcgtcttaaagcaactttatttggtacattggtttgaaatagtgttctctctggcaaattaggtaatgataatagtgaaatatgagatttcaaatatacatctagttccctaattttagggatcgatttagcaaacttaaacatttctttttcggattttctatctatgacacttaaaagtaccaaatgttcttctggatttatttctggttcttcatataatgtactgagtatttcaatttttattgtaccaaaatcttcaggttgaacaaataatggaatctcagatacgacgctatttgcgttcgatttaattgtacccacactaggcatacgcaagtcatttgaataggaattatcagttgtagatttatgaatgctaggtgcagataatagggtgtcataaccctttgatgagcttgtaagagaaactacttctttattatgttcttctttgtcctgtacaatattagattctttggaaataatttcttgttgtaatgatgacgaaatagaatgtttactatttacactattatgagttttctgatctaataacactggggaacctaatctttttaaagatggtgaagagttggcacttgctgataactgtttagtaattggatgtaacaaagcatcagcccgtgctccttcacaaacatccttgtcctcactaatactttggttgttactaacatcgtctgtgctctcatttaatttagttgatccaaaggaatcttctaagagctgcgtaaaattgtttaacctagcttttgcggctggtgaaaattccagtttagtatccaaaaactcagaattagcattattatctggattattaacatatctaatagggctttcatgtatatttataagctcatttttttcatccaaatcggaatattcaacatctatagaattgacattatgattagggtcattatcaactgtaaatcccttatctaaaaacatctggcttgatgaaatattaaaattaatttctttatcttcataccgatcctttaatggagacctaatatggttatttattacagaagttactctgtttgaattttggggagaactaattctttcttgtactggagaacggatagatttgttgggtgacttaatagagattctagacgttgtatatgtaacagaagttgcaggacttgccaaattagaactgattgtattggtttttatcaaatttatatttgaagattttgaatttaagaatgggttattagaagattctgagctttcattcttattaattaagtcatcattttcaaagattgatgctgcatgtgtttcttgtagatttatctttggtatattcatctcgtattcatttttttgaggtaaactttgaatctcaggtaattttaattctttagcattattcttacgatctaaagatctaattgggagaactaattccttcttaaatgtttgagagtgttgggaatctaactgtacttgattgataatcatatcaacagattcactaccatccttttgtcttaaaatttcaagtgctttttttaagctccgtatctctgcttcatattcttgtacctgtagtttcaacctaatattttctttaaaaagatcatcataacctggcttattggtactatcattgtaagtatcactttgcttttcgatatattcaattgatttatctctctctgatatatgattatcatactgagccaaaaggtctagtgttttggtacctaactgaccactattcatgaagatttgtactcacaatattttccgtttaaggtctctttttgttaaattctaaagtaggtgaaacttcaaagaagatagagttaaaaatgttgaatacacttcctttcgattttagttttagtcttaaccaaatgacagaagctaaacttgcaattgtaaaaaggatgaaattgaatttggcgttgtataagttatgaacaatatagactttaaataatgatagacgaaaggatttaatgcctaatatctattctcgtagaatttctaaagagtgaaattttatttttaaagcaaaattactaatattacatgtgtaatgttcaacttaataccaggttcaaatttgttttgttttgttttcgttatttttttttaattgttatctttaattttggatatttccgaaattttattcaattaactaaagtgattatgttacaataaataaaattgtatggacaattgtttaaaatgaataaactgaattatgtgcttaatagattaaaagacttttgaagaaacatctattgaatgataagaatatgtaaccagtatgtaaaatccacacatatatatgcatgtttttataaataatttagatttttttatttatatctattatttacaggggttagacaaagttcataagtactttaaaagaagttcaatcactgagacagcatggtcttgggacacaatatgcttttctaattgtttatcgctggaagcatttattacttcccagtcaaattcttctttcttttgattataaacgtctttccatttagattctctagaagctattggttgtcttcttacttcgatttcaatcctaggccacgattttggccctacaattacactcagtggaattccgagagcatgcgatatatctacctgtgcacctaaagaactattgctatcaaacgaatggtatatattatcctttaatgtaggtgaaaaagataatctctctattatttgcgaagttaaagaggcattattattttcgataccacatactgatactaaataaggagtaatggcaacaggccaatttaatcctttttcgtctcttaacatttcagcaagggatccaacaattctagtaactccaataccataacaacccatttctacgtaattgtcagtaatgttattctctttatccataaattttagatccattggtttagaatatttagtacctaacacaaatgtatgaccgatttctattgaccgacatgatttcaatataccatcattacatttagcacatctttctttatcgattgcatttactattgatattccgtcaatttgaccaaagttgttcttaaggtaatttttaaatggaaatccaggaaattttgatcttgtatttattctacaatctataactcttataaacttagcaaacatcaaatcatgattttcatttctaaagatatctaatattttattatttggtaataatttcaaattggaatcaacatcatgacccattgctttaagagcaagattccagttcaactgacgatttttggggtaataataacagataagtgaattatgatcgttggataaggcatatctaacatcgatatcaccaaattcttggccttctatgagtgggaaggattcagttttttcttgcgtagtagtattatgacaattagaacattcaaataatgtatcttccccattcttatcaacaaaatggaattctctactaatatcgccacccatatcaccattatcagcccaagctttagtatagggaacttttaaagctttgaatatagaatcataagcgtcatttgtcctgtcaaatatttctctcgagtcctttgccgttgttgcaaaagaatatgcatccatcattaagaattctctaccacgcaatagtccaccgcggggtcttttctcgtctctgtattttttatttaattggtagacaacaaatggcatatctttataagacttaatataattccccattaaatctgtaatatcttcttcacatgtagcaacaagacagaaatcgttgcctttgttatccttcaatttgaacagctcattaccttgcttagtccatctttcagttttgtcccataattttttagatgacaatgtacctaattccaactgaattgcacctagctcattttgtaattttgaatgtattaaattatttaatttatcaatggttcgtttccccagaggtaaatactggaataatccactctgtgttttttttacaaagtgtaaatgctcgagcaaatcaggtgttgatagttgtttaagaacagttttgttaatatgtttaatttggaaggggtttaatagccttgacatttaaatcaaaaaagcaatttcttattttaaaaacaattgaccagtcaataaatgatggcacttcaatgtatatatatatatagatgtgtatatgtatacttgtgaatataattatagacgaatttgtgcttcttctattgtgttgtttattctttttaatattcctttagatgctttttttcttctccaaggataaaattttccttttctacttttccagatctgtatagtcaaaaccatagtaatgattagtaatgattaattgatacattttttttgggtcgacaatctggaaagaaaggtaaaattagtcaaaacttaattaaaaacaaatgacaacagccaaagattacttatgtaacaaacagttgaaataagaaagaaaaattccaaaacatctatgaaatatttttaaaagtttctacaaacatcgtaagcatcatgcattattgctatatatatatatatatatgtatccgtataagtgaaggaaacaaaaagaaaccgatgtaattccatataaatattggaaattcaaatattaatattatgtgttattattttcataaacttaaactaaataaatataccaaataaaatggtaaaaatagcatgcttcaatcggtctattatttggcgttaatttgagcagtcaattgaccttgcttaaccaaggcatctggggcatccatgactggtaacataatttcaatcattctgatttttgagttttttggaagtccttatcttgagttatcgcaatccattcaccgattgtagccactctatgattttcatagtcaacagcaccgaaagttggcaataattctaggtgtttccatggttggatttcattatattgggctgttggaccatgaatcaacttttcaatggtgtaaccattattgtttaggacaaataaatatggtttcaagttccatctaattatggtagatatttcttgaacagttagctgtaaagaaccatcaccaatgaataacatgactctttggtgtggatctaattcctcagcagcaaaggcagcacctaaaactgcaccgccagtaaaaccaatggaaccccataagacttgagagataccgatagtattctttgggaataaagtggagttgatcccaaatgcggatgtaccagtttcagtgataacgatatcaccttcctgtaagaagtcggttaaatgagtccataaccaattctgagtcaaggctgcagatggatcattgacttcggcaccagctaatattggacgtgaaggtactggaattggttggtactcttggacaactgctggaataaatggcaataacttttgtaataatggtttcatttggacgccaaaaaagatggcatttttgatcttaatgtgatcagaatgaaatgcaataatatttttggtgtgataggaatacgaaaatgaaccggtattaaaatctgacaatagggcaccaacggacaagactaaatcagcagactcgacacatttcttgatatctggaacagataatgtaccgacatagacaccaccatatcttggatgagtttcatcaatagagcctttacccattggagtagtgaaagcagggaactgtgtaatatcgatcaatttcttagtttcttctttacagtcatgtctagaagcgcaagcatcagagataatgaccgggttttttgcattcttgatcatagaaagaattgtttcaataacttcaatttcggcttctggatcattctttggtagggaaagatcaattggggtattcaaacggtcagctgatacttcaatgtcaaagaaattggctggaatgcctaagtaaacggttctttgtttgatataagtggttctaatacatctgtcaatttggtcacaggctttagcaggatcaacaatcatctcagttgtttcagagatttcagcagacattctatggaaaacatcaaaatcgccgttacctaaagtgtgatgtaacaataagtttttagcttgtgatatggtagatgggacaccaacaatatgcaagacaccaacatgctcagcataggaaccggcaataccatttagagcagataattcaccaacaccaaaagtagttagaaggacacccatgcctttaattctagcataaccatctgctgcataagaagcgtttaattcattagcattaccggcccatctcatgcctggaacttcataaattttatctagaagaactagattgaagtcacctggtaaaccaaaaatagtgttgataccaatttgttttaatctctcgaaaacgtaacgacctaatggaagagtattcattgttattattattattattattattattattattattattattattattattattattattattattattattattattattattattattattaattccttatttttttaatatgtgttaataatacgcaaactttttatttagctttgcttggttatttatttatttatttgcttgtttgttgtcgttattttttgctatatgatagacttaaacattcaagttatgaaagtataattattctttgctcgagacttatatatgcttatttttttaaactttaatatacttattcggatgaataattgaatacgctttcaaaggaaatttccttaaagatttaaggcaagaacttaatactgaataaggaaagaataagctaatgtatcaatatttcattcggttgacagtaacaagaaataatcaaaaacagtatatgaacttctgctgacaaatatcaattttgaatatgcaattacttcataatgaaataattgattaaaaaaacaaaatagaataaccgttgacaaagtaaaaattaattaatctgttaattcgctctttttagtttcttttgtgttttatttttttatcttagcaagtccgaagctattaagaagtcattagcaaaataatcgaatactgataataaatgatagtgaagcatgtggcttgatcataagaaacggctttttcttcttttatcttttctttttttttctttttattagaggaaaattaagagaatattttattcatttttttatttttatgcatttattccctaattcattcttttttatttttttttaacatattttttttgaaatattcaagggtgcatcggaaatgttttgcatatgtcttttttttatatttcaaccctattttttttgaatctcgctatttctcagaagatgaaaaacaaaatttaaacctatcaggtaaagagcacgtaattttttgataaatccgggtaatattgtttttgaatatatatgttatttttcctctcttacattggaaacaaaaataaagaatagaaaaaaaatagagattgaaatgtatacacatccagactagagaaaagagtgagataattgatcattagaaattcagaagactaaaggtacttgagttgctcattaatcatagataaattcagtttaaccatttaattatagtactgttcccccccctttacgcaactaactaaaaagtaagtcttcctcgaatttaagcctgtcaggtgtggatccttcttcgttattcatttttgcatttacttatttatttatttacattatttacatttcttttatatctcttttttggatttttataacagatactaaacaatgtctaatagagaagcaagtagaatttatgaactaatcgtcgaatctgttatcaatgaggttcgagaagattttgaaaatgcagggattgatgaacaaactttacaagatttaagaagaaattggcaattaagattatctgagagtaaagtgtcttccttttcatgggatgaatattccctcaataataacccagtttctactaataacatgatggacttaaatatagataataatggtaatgataatactactaatacaaatgatatattgaataatgaaaacaatgaaatatctgatcaaaatttaaataattttactataaaacaagaaaataacaatgatttacatcctaatttaagtcaaggcttagttttacctggttttgattctaatataatacctgctcctccaacttcgacagtatcaaataccgataccaccgatgataatccccataatgaggaacttcccccagtaaaagaggaggaaggtttcgataatcaaagtgttcttccagattcactgcctgaacagaataatactgaaactaatactaataatgctagtgatagtattaaaaatagtgaaaccattaaaacagaagatatacagaaaccaacagatttggaaaatgcaccacttatcaccactaatggaaaaattgaattaactttggagaatccaaatggtgtagtcgaagaacagttacggttgcaagaaaagaaagctaaaagaagtgctttattagatacagatgaggtagggtctgaattagatgattcagacgatgattatttaatatctgaaggtgatgatgatggtccagatgaaaatttggtactatgtctttatgataaagtcacaagaactaaagctagatggaaatgttccttaaaagatggtattgccactattaatcatagagattacacctttcaaaaggcacaagtggaagcagagtgggtataaatgatctttttaactatttagctatcctatttgtttcccttcccctcctcccttatatctctagttgtttgtttatttgtttttctttctttttgtttattttagtgtcctcacttcgcccacactgtattcttttgtaacgaatattgaattggaatgacttccgttaaattttaattagtaattgtaattgtttaaacttcaatattccatgaaattttgaatgacatcaatagtctaagttttcatcttctatcctcttttgtccatttattaattttctttcgtttaatcaattattaatttcattcatggaaacaatatatacattaattttatttgaaaatttgcagttttgtcaacaaaacaaaacatatataatatcgatagatgtatatagagagaggcaattatgtaatatcaaaaaataaaagtaaaaaaccaaaattataaaaaacggtaagtaaacttttctaaaaggcaatcttgagtataatatgattatagaaaaaatatttactatagaatatatatatttactacttacccagcagggtatacacccttactattcttaacaaaaatgtcctcaacattttgaagagtgactaaagtttgtaatgacatcatctcagtaacggcacttcccatatgtggtaacgccgtgacatcccatctttgtaatagttctttctttatagtatccattgcttcatatttgaatacatctaaaccacaacctgccacttttccactatcaagtgcttttaacaatgcatcttcatcaatagaattgccgcggccaatattgacaagtcttacaccatccttacacatagataaagtatgatcattaatcatattgttagttgagtcactacctggcagagctaacacaattaaatccgcctgattccatgtgtgaggatcttctaaatttggtaaatatttagcgtcataccttaatttttctattgggattagacctgaccttttatgatattgaactttcatgtcaaatactctatttaatctatatctaatagtaccgccaattgaaccaaaccctgagattaagacagttttcttcataggtgaaatgatatgttttctaccaactttaaagttttgaacaacattaacaaccttttgctctttattatgatgtgctgcctcttgtattttaagtttttgaaggaatttgtaaatgtttcttgtttccttggaaccatttttgcaaatgaattctaaattacatacatcagttaattcagtacctaaataatctctacagtttgatattttaccatattctacaagttttatcagatattcccaaaaagatgtcattctaaatacacttatcactaaatgaataaccaattcacatacagaatctgctgagttaggtccaacgttaacaactacacaaattttttttttcacgtagccattaaatctcttgtgaatttaaaacataatctacgtctacccatagaactagcataacccgtaaagtcgatgggaaatcttttagaaagggacttgatccaccgagaatattacaaaacgcttcagttatccatacaccatgacagttggatgttggtagccattttgaaaaaatttccgcagttgtaatattataacgaataaagttgatattatggtattcctccaaatctttccaaagcagcaacgtatcatttaattcccactgtaaccgatatggaattatgatattgatctgtgcacctgccattataaacttgttttcaccttcttttttttatcctattttatcatgatctttcaataatttaataaagcattttgcattgatattctgtttgcaaaaataccttacatagttttgtctggatgtttgtatatgtactccaacatgactatcccttatcactcgaatcatctttatctctgatttttaaatactcatcccgacaacggcttcagacaaagaaaattgaggggtggcatatgaaggaacataattactgatataagagtaaaaggcactttaagaaacgaggtattattaaatattgtgttgtgtccattaaattagtatattgcgtttatgataactaatactatcaaatttggtatgacgctttgtttttataggttcttacgaagaagtcaatactttttagcgatacgtataataagcatctaatatcttttatatattggatcagggttaataaaataaaaaagatcgaactgtcattctacataatattgttacataatatcaaaatttatttgttttctaattgttttttggatacacaccaatatttatagatattgaatgaacctgataccaaagataaagctgcataactaccttttggtaaaaatctatcccaatggaaaagatcagaagaatttgctagaagatccattgataatctagcaagatctaacttaatcaatttttgttcatacttcaattcgtttaatagatttttcattgctcctgctttttcaaataaagcgaactcttgtgataaagaagattgtgttgaattttctggcgaatccaataataaattctgggtttgtaatttgagattcaattcaatttgtttttgtctattttcttttaatagtttacaatttttctgaagacctaacaaaatatcgtattcccatgatatggcttcatgcttcactacaatgggatataattttttgttagatagtattttcaatttatataggaagtctaattcatcaaacactctataataaatgtcaactatattttgtaaagtatctgtctttactagatacttattccattcttcccaagataatccatgcttttcatattgatttgccaagcgattcacaaaatcaataacacggaatggtgtacccccaaatctcaatgcatatctaaatatacttaattgttgacttacccattgactggatgaaacagacagaacagaacgaatcaaacctgcaaaatatatgataagtttgaaaggtgagaatttttgtttatgagttatattacttttgttaggggataatatgtagattcttattagatcgattatacatttaataattttagctaatttatctttaccagccatggtagagataatgtgtttcattatatctattttttgaatcaaaggtttgatttcattgtttgtgaattgatttaaattttctaccgaaggagttttagttacagtatttgtagtttcatgtggcacttttgaatcagattcatctaggataatgggttttcttggagagttcattagagtattgttgttcatttttgtattctcagtgacagatgttttggtaatttgtcaaaatatattacttatcttcaaaattattattataaattagtgtttattattatagatcggaaagaatgtaatgtgatatcacaagttgtccttctatctgaagtatatttggcgcctgatgtcaaatatatatgtgtgtgtttattttgtcaacttaattattttctcgatgattatttttttattcatatattcaaaattcctaggggattttacaaaataatagaaaacaaaagaagaaaagtacagacaagaagtaagtaatactaaaatattagagtgtggagtaattttgtatgaatgctctatatgtacctccttcttaatgcgttaaaacaagaattaagcaagaaagcacatatagttatgtatcacaattaatatctcttgtcgctaatttgtttgttacttcttcttttagtacattcatatacataacaattttttgacatatctggtgaaataggcatttttatatgaaacactaaataagtataacaacttataatagaaaactaattgttctatatttgtatgtttcaacgtatttattttttgtcgtattgtcagcttctatagaggtatttaaggtaaagcacgtatatatcccgctatagtccaattggatttacctgtctttaaataattttaactatttgcgtcactttcctctatgaacaattctacaattaacaataatatatctattattataaggcatgaatctggtgtattttgatgattattgtattatatttactgcaatgtgtttttgttcaagaaaagtctgtttcaggcaaatgagcctgaaataaatgtttgaatcttgaaaaactagtatagaaaggattagagaaaatcatagacaagcatgcaataaatagaatatttatattatacatttagtctacactctaattactaaatatgtatattttagttagatgattagaattgtttactttcgtatacgatcttacactaaccaattatattatattcatatagatcataaaaaaacactttaaaaacttagtgtagtttaaaagaagaaaatttactacaaaaaatacctctcctcaagtatgcaataaaatagacagcccttgctttttttcttagatattgtatgcaagatatactttatataaaatgtggtgcagataaatatctatatatataaacaaaaaaaatcataggtatgaaaatcaggatatgctatactatccgtgatatatgctatcttgatctcacaacaaatgatttttcaaattttttagctcatgatgatgttcgagccttttgtatttatcaattttgtatctatctagatcacgtcatatagatagtatggtttatgtattaaatgtagaagacaacgaccatcaatcatttatcatattatgtattctaaaaaattatgacactcatagtagatcttcatctaccacactaactgtgatgatactttgcttatgaaattctaatgacaggaaatttgcaataacagtaatggtaattcatttcaattaatgtaagatatagacgtactctacacctttaaatgtaagatcaaagtataactaagctaatacagattaatatacttacctgtcttgattgcatttcctcatttttcctatttgttatttttgcttctatgtttgtggatttttatcgaactttatatttcaattatcacaatctattaaattctttaaaggagagagtttagcaaaatattaatgatcctcacttctctaaacaattagtcaaaatcttaaaggcttcaacgtccaatacactatattagtaactgtgacatatgaaatccgaatgtcactataaacgattttgtggactccttggtcggcgacgacgttcttgtttttcttgtttttcttgcttagataagtataagtatttgtataactgtgtatgttagtttactctttatgtagagtataatctatatgtcatatatagacaaccaatcaagctatatctatctatttgagcgtctaaaagagtatatctctcgtaattgggttttcatctattatacaaaatgtagtatcaaggatatttcaatcttgcaaaaaaagtagcgccgcctggtttcgatccagggacatcagggttatgagccctgcgcgcttccactgcgccacggcgctcttaagtacaccgacctgttgtagtatggtgtggtgaagttctttgtgtattccagggaagcgcaaataatattaatagtaattcaaataatcgagacagtaatcaactatagtcgatagtataattactaaaacggtcttatatattaagcggcttatatcgagctaatgtacttattcgaagttacttgacttgttacttgcttgttctattttgtttatacataatatataaattatttacaagaaacgattatggaagatgatcttttatctcctgaaaacgttgtccttttatatgttttctggagctcgatcgattattcagattactacattaatgacttgactgattcaaaccctaaaatttattatattaatttaggtgcactactggattagaactgcatcccaattctctaatcatggtgattagtaatacacgtgggacttaataaaacaataggtaaattctagatttgccaagatcttatgtaatcttgatggttataactattctattccacaacacgacctgttgttgaatagaataataataaccatgattagagaatggaggtgcggttctaatccactagtgcacctagattaatgtaataaattttagggtttgaatcaatcagattattaatgtactaatctggataattgattgagctccagaaaacatataaaaggacaatgttttctgaagatgaaaactatcttctgtcactcctctcttatgcataatttatatattatatataaaagagccacgcaaagtatcacgcaaaatacaacaggctaaatagtaagcaccaagcaagtaacaagcaaacagaataattatataagctcgatataattgttaatatataagactgtattaagaattgcattattgattgtatcaattattgtctcgattattaatagattatcattttcatatttctagcgcttccgcgaataatacaaaaaccctgaccacttcatattacaacactttttgttgtaaaataaggaaattatggtcatatagtatatgctcgtaaaagattctagaagattctagaagaatctggaattacctattatggtcatgtactacatgcaactagaatattctaaatgatcccatgattacatgtcataatcatgtacactgtgttcattatggtttttgttggaaaatggatccttcaacatccatggtaatggcagatataattaagtatagatgcttactttattttgtactaaatacatttatatacttattatatgttttatacagtatacatttttgtatttatttcaagtcttctcttaaagttttatatttcttttcaaatccttgaaaaacatatttggtgaaaaataaagtgttttatataatattaaaaataagtcttatgtaaatgacggtaatcatttctcattttccaacaacttacttattataatatttgtatcattcattattgtaacctattatcctaaatattctatgtgattctgttgaaatagaatgttctataatgaaatagatagaacaataagattttagcagacactaaacgataaattgttgagtaataattgttgagaggtcaccaaaagttattgagtttatttattaaatatcttgccgttcgtagaggaaaatggtttaatgttaacatatataaagtcaaggatttcatcatacattatttttatcttatttacaatctttgtatattattatttctatgttgtatatagagaaagaaagtgaagaactttattataattttgtatactaaatctgtttaatataatattgaaaatgtttactatatatccaatgaatacaggcgctcattctcaacagattcaactaaaatattacaattaataatttgggatgtggattattaattcactaattcactaaattgaatcaccacaattaataattaaggtgtatattactcctccattaagacaaaagattgaatagttgtgtaagaagccctaattggaaattctgaaatacgttgtctgtgggtaacaccaaataccaagacgaaggtcttggaacaaccgaaactctaggcccaaatttgtgagtgtattcgaacgaacatacgatcgtcggatgaacattaatggcaaattattgagaagcttacttaagagacttttgattattgagagatagtgctagaggtgattatcaacattaatattcgtattctatctaataggttgaatctaaaaaaagaataacacgaataactaagactaatctattaatagtcagaatcaaccagttatataatttacaagtgtttatatatataattaatatccatattttagtatactacttgtgatgattcctaatgttatatttcaacattctaagattcaatctgtgatcaaattcattgtataagtgacttttcaattttatgcacaattgttaattgtacaattgtgcaatatgttattcttacaaagtgttcaaaaatattttaacaagtcatataattttaaagcttttgatcagtttgctttcgctatatatagtatataaaaaaaaactcggtaggatatcatggcaaaatttaaaaagctgtaaaaaggaataacgttttcttcaaccagattttgtgctataacgttttattaaaacaccgacaatattgaacatttatcctgtcgtacatgattatcattcaattgtgtgtaacttatatccttatcctatcaatctcattttttctaagacttttacaaaaaaaattcctagcatattcattcattgtataatttgataaaaaattcttaccagaagtgtccctatgattacgatgcttctaaaaaagatttctgtggattagacaaatcattaaggaagatagaatacatgtcgcatctgaatgtgtacccaagaaatttaaagaaaaagacttccaagagttagggccttgagggaggaaaaaacagcaagagtaaaaaagataaatatttgtttgcgtatattaaatacctatatatttctacattaaaaaacaaagaataataatctataaaaaaaaacaagatattttgaagtgaagtaaagaggccaataagaatttagcagacattaaacaatggagaatcaagcgattattgtttaatgtctgctaaattcttattggcctctttgttttctttttataataacctgtttcggcaaagtttataccacttttggtactctaagatctaaaaattcagccacttgatttattttattgtcaacacttatctattcatacattaccacaaatggaaaatattttaaaaacaaaaaaccgaaaaaaaaaagaatttaaggatgcacaaaggagatgtgacaaacggtataccgctaaatttgaacctatttgatataaaaatcaaaggtatcctttcaaagtcaattttatgattcaaagaatcccttctgccataaatgtcgttcaatcaggagttttattttctatctctcgatacatcttaacgtttgtcccacctcacgcagattaccaaaaagacttttcctaaagttattcattttgtatagtttttttttctcttgcaacaaagcgtacttacaatataatagcgttacttattatttttttgtactaaatcatgataatgcaaaattttttacaacttttaagatacaaattctctacttttgatgttctttcaaattcttcgccaaataaagaagagttttccccacactgtccgttagatttgccgctaacatgccaaaacacaactcaacagttagatagttgttgctttgagtatccaggtggtgttttcttacagacacaattttggaattatagaccttccaaaccaggtttaaatgaaaccgaaatcatcagtgaaataggtcccttagactcctttacagttcatggattatggcctaataattgttttggttcatatgaacaattttgtgatccctcactatttattgatgatgtatactacttgttacgtgaaagcaatgatactattcccttataccattttatgaaaactttttggaaaggtcttgttattggagacgatgaatcactttggatacatgaattcaataagcatggtagttgtattaatacaataaaaccaagttgttatagtcgttgggagaatatatctgcaatgtcattaagtgatgaaaatattattaacgagaaggaaagaaagaatcacagtgaaaagaataagtttaagaatagggcagttattgattacttcaatataacaaaaaatttatttcaaaaattagacacatataagattttaaaggattcgaatattgttccttctttagacaaatgttatacaagagatgagatatcgaaagcattgaagaaaggttttgaaaatcatgaggtttttttcaattgtaataaggataatgaattacatgaaatctggtatttccatcacttgaaaggatcattattagaagaaacttttattccaatagattgctcacaaaacccaccctattctagatgcaagaaagaaggaattaagtattatccaaaaggttattatccatcaaaaggaacagaaaagacagaataaaaaaaaaaagaaaacaagattctacatgcacttatatgaacttattttattttttccttgatataatattaataagtagataatattctttagttaaaatatacaaaaaaaataaatatcaaatgtgttaatttaataattataataatattacaacgtaaatataagtgttatatctcactgaacacccttttatgtatgtatatatgtatatatgtatatatgtgaatatgtgtgataatacctaaatttttctatttaaaatatctattgtgcttatatcatcatatgtcatatcatttccaattctattgttcttatcgctactattaatgttaatattattacgatataaagaagagtttctttgatagttcggtctactaccactgctattatttatgctattgttaggacgactataattagaatgtgcatgattatgatcatgatcataataataatcgtaatcgtaattatgcccataattatgattataattatattttcgttgcggtgttggtgaataaacaattggatcagacttatggctatagaaatccctaaaataattatcttctttattaacataattaatgctgttgtatttattgccactttttcttagttgatccattaacatataatcatagctttcatctttattccaataatttttactttgtgggattgaatcataggatgatactggtctataagaaggtagggatgacgagggttggtcgaacttattattattattattgttgttgttgttattgttatttcttgattttaagattaatgattctaaattgtttaaccttgaatcaaaattatttaataaggcttttaaattaattttatcaaagttatctttatctcttgaatcaagtaagcttttaacctcattcttcaaaattaataattcttgatgatcatcagaacttaaagttgctgttgaagataatctagacgatatattattgttattgttattgttattatttttagtttttttaacacttccatttaccaaatagttattagtttcatttatatgtgatctagctggagattgaatatctctattcttactttccattgccaattgataatttttcatagaagtcatatactctttcttgaattgttcgatagtatcatcattttctggtcttgaaaagaaatttctagcaaaactgtactccttattgctcattatatggtcatatatgtattaaattttttatttatcacacagacactatccttatggttattagttattagttgtttgtttgtttgtctgtttgtttgtatatttatttggcttcctcttgtaaaaaacttaacaaaaaatttttacaatatattttaatgcaataaaagtttgtgatacaaaccatgtacaagcttctaccaaataagtaacagaatagaattagctaaaaagtagattcaaaaacccaaagagcaaaaacatatgaaaaaaaaataaaataaaataacaaatttattaactacttattctttgattgtttgtgtattcaaaaagatttgtttatttacttatttatttggaaaacgcgaaaaaaaagagaacaagaaacaagaaatctaaaacgcgaaaacatttaaaaaaaataaaaaataaaaaataaaattagttttttcgatttagcagatttctaccattcgtggaaataatttttcttttctttgttccgtggaatcaaatgaatgagttcaatccaaaatcaatattggatgtgtgaacagaaagaaaacacggcagcagaaacgaagacgaaaaacgcacatcaacaagaaacaaagaaaagaaaaaaccaaaaaaaagtgttctattgtttttgacgaatcaccgattctttttctgtttttttcttttttcaaccgtcctccccccatcttttttttttttttgtctttttagaaattaggggaaacatactcttgaaaaaaaaaattcgttgatattggggaattctatttttagatcccgaggggaaacttttgtttttgtttttatttttattttttttaataactaaaccctaaggttgaattttcttagggttctcatttgattgtagatctgtcttttccaataaggggcaaagtgggacgagaaacaggaagtggacaaagcaatgtgagaaatagctaacacctgtctagttgaaaaattatttgttttgatctaaccatatatatggatataatataatacattataatataatataatatgatatgatatgattctgacatcattcgatcttgtacaaagtatattataacagtacatactttctatttacaggatacaccaccaatcaataaaaaacaaatcattaacgaaaggttttttctttccttcaattattttttttttttttcatttttgtataggtttgtctatacctatactatctgttcagtgcttccacttcctcctattcacttgtgtgactgtaatacagaaggcttaaggatatattgaagaggaaaaaagctttagttttctttccttctttctctctctttttttttcctcctgttctttaataattgccttttcaattctatccattacacaaagaaatatatatatatatatatatatatatatatatatatatataatgtttaattcatcaccaatgttatcaaaattaaacaatgattcaatttcaaatttaaaacaatttaacgtcaaaccacaatctataaatatttcttcttctctttcatctttcactattgctactacttccaacacaaccactaccaatatcaataacctaacttatttaaatctaaatgatccttcttatgaattaaacagtttaaaacatttcgatttccaaagtgacaatatattaaaatatattcaaaataagttcaattcagcaactatatatgtcttatttattgacacctcgttaaaggatccattttccatcaatcccttgaagctgcactcaaatgattccttaacaatcaacaaacttcacttaaatctaccaactactctaatcaaaagatccaagttcaaatttgaaaatttattgaatgtatccctatcaaatgataaagttgaaaatttattaaatttaatcgatctaagttctgtctttttcatatttgacaaagacagccaattcacaaggtgtacaaaacgaaactattatttgatcacgaaatttaatcaatttatcctatccaaatatggtaccaacaaagaaataatattcatttcatccacaaataaatttgctccttcttcatcctcatcctcattgtatccaaactataagaatagtaatcaaaatcaaaatcaaaatattcaaaaatataatctatccatcaatattccacaaataaatctatcaacaaaaaaattgtttatccaatcaattaaaaaggatactgtccattattctccagtatcattgtttaagtatttccaattcaatattccaagtaatatagttaaaaatgatccttgtttacccaattggttgaaactttttagtgataaacaaaaatctaatcaaatcttgttgaaattagaaaataatttccaattattagaagatttcgaaattgaaagattatcaacttgtttggttgataacagtaatccaaacgaacataatattagcactaacatcactaccaccactatcaacaacaacaatattaataataatgataataataatgataataataataatactcttaatgctaatgtcaagcgatctaaatcaatcaattcaactccaatcaatcctacacacaagatctattctttagctttcttacaaaaacaatttaaagagaaaaaataataacgataatccgttacaggaagataaaaaaattgttacacctcccttgctaattaacacaaataattcttcgattaatgttggtacaaatggtccatctactgatactgattttggcgacgctgaaactacaagttccaccgagtctctattgacacctttaaagaattatgaattatccaaaggtgttcaatccttcaataagaatagatattcaaatattttaccgtatgaacattcaagagtcaaactacattactctccaatagaattccccagccaaacggataataatagtaataataacgataatgcatctaatggattttttattgctgatgattcatctcctataaaaataagtggagattcattttctgttaactcctctactccatcagatatacacaataataatgccagacgcaaaaggaaaggatcttctgttatatcagctggtaacctagatgatttaaaggactctttagaaaagaatatttttcacgcaagaccaatgttattacactctaagtcttcaccgtacattagaaatatatcaagttctgatagagagaagttcaacgactattttaatgcgaattatttacagattcctcaaattaacaaagattacaaatatgtagctactcaagcaccattggtaactacattcgatgatttctggaatgttgtactttccaatgatattagagttattgtttcattgaattcggaaagtgaattagaaatgaagaaatgggatgtgtactggaataataagacaaatttaaagtattcaattaatgctattattacactaaataatgtaaacggcttagacggctgtattctgcgaatatttcaagtcttcaaaaagggtaaatataattactcaatagtcttccatatacagtatacacaatggttggattcttgcagtattgatatagttgaactattgaagatttttaatttaaaagatgctttaatatctaacccaatagaatgtctaaagaagattataaataaaaatcaaaatgcaatgaatactggcagtgatatccttaatatgaaaataaatcatactattgatcttttaccagattcattgaattataaaaatttagttcgtagcaatactccattattaatacattgttctgctggatgtggtagaactggtgtttttattgtattggattttttgatcaagattttggacaagtctactaatcaatccaataagatagatgtatggaatatacccaatgacctgatttttattattgttaatgagttaagaaaacaaagattgtcaatggttcaaaatttaagtcaatatattacatgttatgaatctcttctaaaatattttgcattaattaagaataaaacaattcagtcagactagatttatataatatattgatacatttctgcatgtcttcatttgttctaaattatatgcacgtatatcaatttttgtgtctttctaagtaaacaatatcagaatatcgataaataactcttttaaagaaaaatttaattatagagttgcatacaacatctatatatataatgttgaccaaattaagatatgttttattaaaaagaaatccagtaatattatttaccaagagttattgtaattctatctaacaccatattcatcttgaacagattgttctcgatgtattcaagcatatgtataccgatatatgtgtggtatagattatactacattatgcagttttaattaaagaatttgataatcccaatatatatttaatatttctgaagataaggataacaacgattaaataaatttatactggaaaacaaggtttacaatttaaataaaaatggccagtactgaattaaagcaaccataccttgatatgtatattgacttactatatggataatatgaaaagcctttaccaatcaagtagttctttatccatatctagatatgtttataacccttcacctgtctgtttacctaatatgaagtaagaaaataaagtggtgacacatcattaaatattatttgaaatttattaattaaattattgcctttatttagaaatgttgaagataaaaaattatgacaatttataattaaaaaatcaatcttatgtacattttatcctgttccaaatacatcgactattgttatacaacaacaatcaaacaattgtgattatacttcttgcctagttatttgacaaatatgatatatatcttattgactaaaaatattaatttttttctcataaatttgtcacactatttttaataaacaagtgttatttgtaacttttcacctaatagctcagtatcaaaaatagtatatatcttgactcctaataataaaccttgaaaattagaggtgttgttatagttattaaggatattacacaatatacagagtagcaatattaactccatttttcaactcacgaaaatcatacaatgctccaactattgaaatctcctaaagtttaatcacaacgattttgtcttaatgatattatgcaaaatattatacattatccttatataataggttttctacaaatagtgaaagatgaaacaacaaaggcaactcagaaattattaaggattgtatattgtggtgtcactttatgattgggatgaacgcatagaaagaaataattgaagattttccaacaatgtaggattgagtctactcaataattctttatacccacttggaccaagatatgtttcaacatataccattgtctgttgaatgaaatctttcaaactaatagtatgtactggatcattatttttagacaattcatgctgtctaaactgttcagtagtcagagggaaaaatgcaattgattgctctgtaacaacatcatttaagtggtatttttcacaatcaccattgttgttttcatttatttcttccaatatctctacccaaagggatacaatagaatctaagttgttgaacacaataggtaacttagttctcaataaacttgatatccccaaaatatgtatttttttaatttttgggtcgtaaatatctttaaaacaaaaaatccaaatctcaatgaatttttctaccagtgtttctaatggataatctttgaataccaattttcttgacatagcagataattgcatgttttcttgtacagtaggcaactgactatgataagttgacaaatattcaataattgcgtctgggttaacataggttaatcttgcaataatttgtaacaattggccacattggtatgtagataaagcatcttctttaaaaatagcatcaaaaagagcatttaatataccagcttgataaaaattaggaataagaactgcatcatagttaggttcatcagcaagtaccaatatttcccaagtatcaaggactaattgaagagcgtcctctcttaattttaataaattcgatgctatgctggtaaaaattttaccaaatgttggaagcaaaaaaattcagtttgatttaaaattagtgaatagctcttaacaatttccaataatgttgctaaaatttcagttcgagtatcaataccatattctaaaaatggcaataaatccttaaatttttcgctaagttggcattctttcgaagagtaattttgtagtagagattcccataagtcaaagccatcctcatttaataaagcataatgactagtagatggatcacaagccaatgatagtattggcaacgctatatcccatgtcaagtatgatttaggacccaaggaagaaaccaaatgtcgaatcaatctcaaaagtgcatttgataaaattgattcggatgcattattattagcaatatcccataactttggaacaatttgtaatatttcaaccaataaatcttggtttatcaatggtttagtttgtataataatatcacttaaagtatttaaaacatacaatcttgtctcggttaaggatacagaaggtaacacttttcttaaaagtacagttgtaatatcaattaaataaggttgaaagatatctttatcaaaattccaatcgtcaaccatagttctcaatgactgaacagcggataaagtaacaactttatcatcatcagacattaataattcactgaaaaatttataacataaagacttacttttttcagaacttttaacagtacaccattcattgataattaaacatactcttcttctaataatctttaattggtctaaaccagtagcattatttgttgcctctggtagaaatacgtcaacaagtaacctatcgaagtcaaccatattactaactgctgaagcacttagttggaaacttgcatatatagcatcctttttcaaaaaatcttctaaggagtttgtcaaagttgtagcctcattttcaattttatttaataaatatgggaccaataaatcagggaaagaattgatcaaatcttggaagaaattttcagcacatggtctaatttggtattcataactagttatcatttgctcattcatccattcttctggatcgcaaaaccaactttccagttctgcaggtctcaatttcaagtaacaatccactaatatatcaaccagttgtttaattaagttttcattcaagaattcaaagttaattttttgaatagacatgtcaatgctttgtttgtcatttcttgcctttaaggtaataacaccttttttcttaacaaaatttatcactcttttcaacaaaagaaaacctctaatagcaacatgctcccaaaaatcacctgaaacatcagaattttcgttataaaccacagatgctttctcaaataacaactttgtatacgtaattaagatctcaattgaacatggaatcgaaataaaagttgttggttgttcagtgactaaagtgtaatacaacttaccgtagcacttgatgaatttctcataaacttcatatttacctaacacgtcttgttgtgagattaaactttgtaaatgagtaaccgataattttaaaaattcgcatacagattcgtctttttcaggtctttcatagccttcgctaacaattctccttaatacttttaaagctaggtatgacacttgtaatttagttaaattattcgaaccatcattagtcatatttccattattcgactgaagtttatgtgtatattcctcaaaagtttgtaaataaactcttacaattaatggaaatatcaagggcactttactttgcatcgcaggtttgcatctaccaattctagcagtccctaatatttttattatttgattaatatgagttaaaatattgtaaagttttacatgatcttttctgacatgatcgtcttttaaaagtgcttccaattgctcaaatagattgggccattcggcaggaaaatctagtctggaaatttttgaggttgcctgtgcattttgtatacataactgattattttgttcatcaatcaaatcaaacaatctagctctaattgttgctttttcatcttttttaattgcattgattctactggacctccaatacttgtcaacaccatttttaaattggataactgccaaccatctaacctgtaaagggttagatagatccaaatatatagattgtagcatatagtgaaagcctggttgagtctcccatacttttaactgatgttctgctaatttttgcacatcagaacctgcatgttgtggattacttgcctgttctaatgtttgaataatgttttgttccgtcagatcagcatcggttgtgaacattatttccttgtgtgtaatctgtggaatagcttactattatcgacaccaatattgttatattactaattttgttttctaagacttttgaaaaaatattttttaaggtcaatttatcagaacaaataccattaaatctctaatccgattgttcctgaataaacttctgagaaatgtttcagttcaatccttaaaaaaatattgttgtgaataattatcgtaacttatactgatcttacgaatttttttgttttttccttccttccactttctcttttttaacacttctgatgtcctttgtatttttccttttacatttttttttattatcactacaagacaatctgattttttcatttgaaaagattgtatcgaaatttacacaataatattgatctattcaattagaagaaacaggatattcataaaaataaatgtatacatttattacatacacggaattacacaaattacttttgacttagttaatcttatacgtattgttgttgtttctatttgggaaagaaatttatataaagttacaaaaacgatatttaatcctcagatctaaaaagcaaaaaaataagtcaaaggaaaataaataatactaatgaaacataaatggaaaaatatgatataagacattacaagaagattattcattgattttattttatgttattgtgtcatggtttgtcttaagtccaacgatgggcttcatcaccaccactccaggaatgttcaacataacctaattcctttttgactctttctacagtagctggatcacccatgttcttacctagattgtcagatattttgattgccgggttcccattaacatctaacaacttaataacgatatttagaggttcacttttgacagttggattagattttattttgaaatcatttgtaaaattagttcctataccaaaactaactaacataccattatcgtgagctacttttgcatactcaatagccttgggaatatttagggagtcagaaaaacatatccacttagaaaattttggtaatcctagaatatcatgataatgatgagcaattttttcggcatatttggctggatcacctgaatcttgtctgacaccaacgtaacaatcagaatatggtggtttaaaagattttaaaaagtcatctgtaccgaaagtatcagttaatgccaaacctgcatgttcaggaccaaaagtttcaatccaataatccatagccttcttattcgcatgactgtagtcctgtgtaatagatgcaatgcccataaaccattcatgagcaacagtaccaatgggtttcacaccatattgtttagcaaacaagacattggaggaccctaagaacaacttggaattcttttctggattttctttaaccgcttccataatacctttcatgaccagatcttgagtatgatacgatctacgacgccttgtgccaaattcgctaaacctcaagtcattagcaaataattttctagctttttcttgggcttgttctaattgatcatcatatacccaatcagtatcaacaaatttaaaatatgcttctgaaattaaggctaataaaggtatttcgtaaagaattgtatctttccataacccccttaccaaaatatgtatattgaatctttcctcattaaattcttcattaaagcctagaggttctacggtaaaatcaacttgctctgtaggatttaatttgacagcatctgttttgatataatcaaagtattgctgaggcaaataaggaatctccttttgtaaatattcaatttcatcagaagtaaaaactaggttgtctaatagactaatttggccttgtagccaatcaattgccctttgattaaatgttaactgttgagatctatttgtatatttgtatgtcactttggcatcagggaagttgaccacaacagccgcatgcatagtcaacttatacatatctgtatctaataacgacttaataacttgcttgccagacattgttcatacaaaggatatttataccactaattagatgttatgtttgttttattttatttatctgtcacttcaataaaggagtaaaagtaaaatagaaaaaagaaaaaggaaaaaaaaacaacttcacaatatattttggaggtcaatggagaatagattttgttccaacctactttctagttgatatgatatttagtaaactattatggatagtgtctctatcttcccttcgtagatgtaaaaaagtatcatttttatattttttattacatttagtcatatatatatatatatattttcctttccattttccttttgtttttgcgtcgcgtcaaatcatcttatacgagtgacacaagtatcggttcttaaaaacaaatacagattattaaattgagaaaattgaacaaaggacattcataaaagaactttctaataattacacagtattagttcaacaaaagtgtctaataaacttgtataaatcgttttttaatatatatatatatgtgtgtgtatttatatttatatcattctattattattattatatatgcgataatggtattccactatagtacaattatatgggtttgtttacttggattactattaacaaatagatatcttattttgtaactaatttaaagttttgataacattttcaaacaatgtggtcatggaaatatcttgaatgttttcaaacatatttgagaaactgttcatattaattatgctactagtcttttcaccatttattacgtctaagtctgtatcatttatatcttcatcaataatatttggcctatttctatctgaatttatttgttgttctaatggtattttcttgcttgcagccaatttccgaagttcatctagataattgttttgagcaattatattatctgtaacataagatggtgtcaatcctacacttaacccatctaatataccctctttattaacttcatcagcaatctctgtattcattgtggtagacactatacctaatctagaatcaatatcaataaagaaaaaatctgtatcatgattccaaccaatccaagcaatgtattgatcatgtgtgaatttgcctaactgatgagttaaatttgcattaaatactaggatgttagatttaaattgaatgtttggcatctttgccctcttatcatcaccatcatcacattggtttgtatcacgttgattgataacaagaacaatctttccatctttataatcacacgatatcaatcttttcaaatgactattcttgaagtttgtattaatatatggatataaatcaaaaccattaacaatttttcctaatagtaagtctaatactaaaagacttgtcattgtaacaacaatcagattggtctgattgatcagttgaagacattggatctgtgaatccatactgaactcattggtaatatttgattcgcttggtggaacccataatttaaaagtatcaaaatcaataatttgtaatttatcatcaaaggagtggaaaattaaagattgatcatctgaccattgtaaatttacggaattattaaaatggttgaaatttgaatctaggatttttttaagcaccaattattttcataatcatcaaacttccaatatttaatgccaccgttattatcagcagtcaataaactagattcatggttaccacatatcatatctatgattggaacattgataccatgagggtttatgactttagttttcaattcccagacaccatctttattatcattgttaggttgacaccaaaatttcaaaacatgaatcaaatcatttgaggataataaatcctttggtggatattctacttcgtatgtaaccaaccatttcccatcattggtaatctttaacaatttaatctggggatccattattgttctcaattcatttctaactttacccatatgcatttggacaccatctgttagaaattgtaaattggttgattcattcttatagaaatcgaatcgttgtaatgcttgaccatgaggaatatacaattgtttggtcactgggtggacttcaatagaggtagtgaaatccaaagttgccatatcatcagtattcttcatcattttattcagttttttcaaatgttttttaatggtagaaacattcgatgaatttagattttgagttgaagttggaataatcacattggataattgttgttgaaaaatcggcattggtcccataatagaaatctttgaagttagatcgatagaatttaacaacaagatttgatagtcattgtttgtagtattttcagtcaattgcaaagtgattgagtaatatttacccaatggaccaaccacttttgagtcaataactatcccattaagacgtggtaagaattgttgttgatttgtagaaagttgccaaaaacttaaaactttttcccacccaccagaaatcaaataagagccatcattattaaatgccagggataaaacagaatcaatatgccactttaagtatctcaactccaaattttgtaaagatgcaatattatcattgattgagacaatagtgatgacaccagaggcaaaaccaacagctagttgggaccttgagttgtctatagctaaagcagtgacaaacttattaatagtatattgattattagtactattcatcaaggaattgttattattattagctgatgccaaagtcatgttcttttcattaaaaacatttgaaaatggaatatcaatgttatatgaacccctgtctgatttaaatatgtcagttatagtaaaaaatttaccagacagtttttctgaatttttttacccattaatttatgtaataaacaaattatattattatcatttgaccaattgattaaaaatacattactccactctttatataaattcactttaatatccgcgtggttattattattatcaaggtttaaatcaaataatttatagttataagaggaatttttattatttaaataagataccataattttaaattggttcaagtcagtattataaaacaatttaacaacgtttccattattttcggataattttaaatctgcatttaagtcaataatctttaaatcatcgtctaatttacctttgtatttaagtaccacgatctgacccttattagtaatcactgtaattaaattattattattattattattattattattattattattattattattattattattattattattggtagtagtagtagaattttctatggttatatcatttagtaaaatgtcaacaatcaatgtgttattattattggaaaaaagatttgataaaattgaattattagagaacttaatagtcttaacacattgccttgtgtctaaggaataaactttcaactggttattgaatggtacaatataatgtagttgatcatgagtcagaatggaaatatttttattgttagaaattgtattaccataatttataccatttgcaattagtggtaaaattggtgcaccaccagagaccacagaactattataattttgaatttccaccatttatccttatcttctttgatgtaaaatcgatagagaaagaaagatatagagttagggaagtagaatccagaaaaaacaaataattaaatacaaaagcagataaagtagtattatttagctttggttggctaaataattgtacaaattggttaaatgatagttgttagaatatgaaagtatataaaagcaaaaaagtaagtttatgaatacctatctatgtgtagatgcgatgcccagatgaaaaaatttagtattgcagagttagacataaggaaaaaaggaaaaaaaatttttgtttttttttctttccttcgttttcttcaaaaacagttttctttacacccatacctctttttgcttgaataaaataggaaaaatgttaccctcattttttacttaatacggagaaagagaaagaacagaaaaaaagaactaaaaataaaaaccaaataaaaagaaattttttttctttcagtaatgtaatattcagtgaaagcgatgtgtatatcaataatatatttttgtatagatacgaatgcatacatgtagggagttgaatactagagggtgttgttagagtttggaaataaataagtaaataaagttaaaataaacaaacagacagacaagcacaattaccgcgattttttatttttttttagtatacgaaaattatttgtagacaaagatgattgttccagttagatgtttttcatgtgggaaagttgttggtgataagtgggaaagttatttgaatatgttacaagaagatgagttagacgaaggtactgctttatctagattgggtttgaagagatattgttgtagaaggatgatattaacacatgttgatttaatagaaaagttcttaagatataatccattagaaaagagagattaagttgaaatcgagtcaacttatagtcacaaatgagaatataaataaaaaaatattaaacatataggtgcttgttttgttttacaatactacagatctacgcgtagacatttgtcagatacatacatatacatatatacatacatacataatcataagtattgtttatcataaccattttacctacgggttcatttattatatagatacgtatataatgtttatcatctctaattaatataccatcaatgcattaataactagtagaaagtgaaatagatatatgtatttatttttactggtttattcattcatgattgtttaaataaaaagaagagaatatgtacaaccacagcatgataatgctattactggcagcatgactaatagcataattagtagcaagattaatagcaaggttaataaccaatgattggttagtcggttaatcttgttatattattattacattagagtatgttataagaaggctttatagttccatccttacacccttatcttgagaagatttctgtgttgtatatgcagtagcagtctaaactcttagaactctgcagttgtaattgcaagttttgttccaaatctgctgtgtgttccggtagatttttttgttttttttattttttttattttttttattttttttatttttttatttttttttatttttttatttttttttattttttttcgagggtttggtgtgacaatgcagttttttcccctttttcttttttttgttttttttcctttttccaacccgcgttttgtggattttatttattcatctatttgtttgtttattgatttatttatctatatcgatctatttttattctgttttctttacgcgttgcacaaaacgcaaaacacacagagtcctctgctccgtggcacaattaattcaatttatacgtctgtttggtcttttgtcgttttgttttgtttgtccccttttccccttgactataaatattgagatagttattccaactaatatacgtcctttttccattcttttgtaacgtcgtggaccgcaatcaccgttgttcgctttcgaatacactatttggtgaccgtgtgtaatctttcgaagtgtaatgaattagtgatatttcaaaaaaagaaagaaatatttcttgcttctggtaaatcaaatagaacttagtttacttgttctatctggaaagagatacgtttctgtatttaaatgacagttaaaaaagtatataaatctcaaaagaaatccacaaacaatccaagtactatgaaagcatcaataacctcaacctcaacttcgacaaccccttcaaggagttataaagatcttataactgacgctttaatcgaattaaaaggtggtagaaagggtacctctcgtatcgctttgaaaaaatttgtaaaggaaagcaatccaaatctatcaagcaatagtaattttgatcattttttcaatttggcaatcaaaaagggtgtcactgatggtatatttgaacaaccaaagggtccttccggtactataaaattagttaaaaaacctgcctcttcagacacctcttcctctaagaaaaagaaatcaacgacctcttcttctttttcttcttcttcttcttcttcttcttcctcttctccatcttcttctactccaaaatcaactaaaaaagtttctaaaaaaacaacaacaaaaactactattgttaaagctccaaagaaaattactaaaaagacaagcacatcatcaacctcctcttcatctagttacaaaacaatggttataaagggtgttatttcattaaataacgggaaaggttccagtcgtgttgcattaaaaaaatttgttaaagatttatacatcaagaattccggtggtaaagaaccaccttctaattttgattataattttaacaaaactataaaaaaggcaatcgatgatggatatttatcacaaccaaagggtccatctggtttagtcaaaatattaaagaaaggtaaaactttcgtctcagctgcttaaaaaaaaagaatatataaaacaagatagacttagttgattctccttttcctctttctatttatttcttcttccccactacaagctcgctcgcacctccaatttgtgtttctttcttttatatatatatatatattttattattttcttttcttgttgagaaaacaatttaccatcactgattgtatttgtatattttttttatttatttatttatttatttatcctgtttaatcaattataattgtattaatatatatgtgtgtatcaatatatcgataatattaatatccgttttacttaactcctatccatcttatcattttttgttaccatcctatgtttatatgatggtattcatcgacgatgtatggttcaacgtacgtcaatagtgataaacttgtttccatccacacaccacgttgttatgttgtacatttctgttttttttttttttttttttttttcggttttttattttattaaaccctaaataaaactttccatgacctgaacaatttgttctatttatgtttatatctttgttgtgtatttcccattttatgattacatttagttttaatagttgtagtattctagtaaggttcgatattaatactgtttttagttgttcgtgttgaatacctggacactaatccattcatatttcccttgtttctcaactattctcattgcattgaagtaaccctttaaattggattaattagtacactttaacgtaaaggaaaaaaagaaaaaaataaaaaaagattagtataatatgtcttctacatttgctgaggataacaatttcatacctgaatcggtcgcttctaatagtagtaccaatgataccactgttgctgccgctgccacgaccactacttctaattctaattctaattctaattctaattccacaaataactctaataacattgtcgctgctgccactgccgctgctgcgtctcaaaacaatacacctactgttgttgatcccttcaattcagctgattcattgaacagattcaataatattatcaatagtttaccattgaaaacaagactaactatatcgtctctatgtcttttggataacgtcactactcaattattaaggttgttaatctttaactctaatgctccacatctattggcactttttactgatcaatccaattatttagcttctggtgagactgagactttccaaatcttactacaattattcaaacaaattaaaaccatttataaccctaaatccccacttttaaatgttcacgatgtcgcccctggattgtggttccctaattctcctcctccaatgttattaagaggacatgaagcatttattatcaccgtaattagaaagactaatttattgactttcattttaaccgctttacattgttttaattatgggttcgatttactgcaatcaacatttttggatattttttgtccaaacactttatttacgggtacaacgacaaacgatcaaaatggtaaatttttgaaatctcaagcaattctttatcttgatttaaagacccaggctttagttgctgggttgaaggaatctgaagatgaatctgattcaatcccaagaattgttttggagaaattattagatgaaatcttcccacaagatttagctgaccaattaatccaaagacgttgcggtggtaattctactgctactaacactataatgacaccatccgaacaagatttcattgaaagatgtacccgtagacgcgaaaacttgttacaattcagtaatttggacgaacttatttcaagctacgattggaatcattttattaaagaattattagattattgtaacaaaaatatgggtcttatcatctggggtaaaaagggacgcggtaaatcaccactttattgctatgatgttaaagaattcgatgctcagattatcgtagcatctggtgctgtgcctccaactggtaatccagatttatccacaatcgactcaaccggtagaaacaatgctaatattgtcaatgaaaatggtgaaattagctcaataatggattccgatgtaaatagatctaatctatcaagttcgcgtagaggtcatcaaattagcaatgaaagaacgtccagtcaagaaccagcaattgatggtattgaaggaacaacttttaactctgctgctgttccaacaggcagctcaggtgtattgatggattcaacaattgcagccaattctgcaatggcccaatacattgttaatgctgctgtagcttcgtctggtactcgtattaagaagataaaatcgaagagaacatggtctaaagaagaagaagatgctttaatagaaggtctaaaggaagttggtccatcttggtctaagattttagacatgtatggtccaggtggtaagatttctgaagatttaaaaaatagaactcaagttcaattaaaggataaagctagaaactggaaattacattatttgaagactggtaaaccattgccattctatttggtaaaggtcactggtactttagataaatcggtcaaatcaaagaaaagaaatgcaactgctaattcttctgtttccgatgctaataataatatggaattgtcctcaactcaacagaatactaaccttaataacgaagctagccaatctcaagaaccatcaggtgctttgtttgaaaataattcaaccacaaatgatgcatttgatccatctcttgaaactgctatgtgaattataatatattttttatcgtcatttttttttaattaaaattaaagaaaatagaaaaatgtataattatattctcttcatactcacgccactactacatcctttccctttttttgatgttgttttattatgccaactgtttttttatctttattaattaaaaatattattatatttatatatgtgcgtggttaaacgatatacttccaatttaaccatttataataaattttaaaatgtaactatttttattcttagtttatgttgtattatatgtgtatgtatgtatatacattaaattatgtaacattcgttttatctaaacatacaattttttttcaaggttcatatcagataaagttcttccctcattatatagttataaacaatgaggatgatgtataaccactgtatcttattgtattttttaagtgtataaaatttacatgcatatcagttatattagctcatatatatatgatcacattttataatacaaaataaagaaactgattaaaaaaaaggaaatactagtgaaaaaaataatatataacacaatatttctctcattttattcagtattcttcttaacataatcccaaagactttttaataatccatctggtaaactatatagatcgataataaattctccttcttctacattatttgtaacattcatttctggtgtattattatcagatatcatctgtaccacaccaacaagatcatcttcactcaatttagtcatacctaatgccaatttttctaaatcaatattacctttaattgtggaggcactaccagttttggcttttttaggtttaggttccgttgcactagcaagagtgccttttctttttccagtagatgtaccaccgcctgtagcttcctctacagaaccacttttctctagttctgccacaagtgcaggtttattagtaggtacttgaataacatgatccacttcatattcttcctgtaggaagtttaaatcgtgtgggatttttctctcacctgctttatctagaaagaaaacactgatatctaaagggaatccaccccacccttgttcttggatcataaatggtggttctgttaccgttctatctggattagcaaatgttgggtgtagatgatatgttactttttcaaatatactagctggaacctctttattttcttcatccaacaatagaagttcgatagaccattgacgaacaggaaagttttctacaggtggaacatctggtaaaatatgttgtttagtctttatacgtacagttcttttcactgtctatatggaatagaaataaataaagaagaaacaaaataaaacaaagcaaaacaatatataatagattaaagtagaattgccaataaacacttgttttatttgatttgaacaaacggttgttagtaaaaattggaatcgataaaaaaataaaatgttattatttttacatttttaaagaagtagttgattcttttcttctttaaagcctccataataaaatactatgtacatacagcaaccattgtcaataaaacgttctcttgatagtttttttatatatattggtcgtatatctactatgtttttaaacaaaaatctatcttgcagaatttatttttctattacgtgtgtatgttaaagtttatactttatttactatttttttttctttttttaattttcttaatttttaaaaattcatactaagaatcttcaatactcagaataataatttccgtcccctgcttcgtctctttaaatgagaaaaaaaaagatttttttggcgatttttatatttttctaaaaaataaaaggcacgaaaacagagactcacgtgactttctaggttcttttacactacaaacgatttgtaatgcaatttccaattaaaaaaacgtcacaaacttttgaaagagacactagccattaaaacaaactgtatagcattctttactggtttatatactgttattggaaactcttgatctgatgaaattaataataaaaactgatacaaatttaatagataataataaaaactgatatatatatatatattgaaaataaaaaaatgtgaaggctctaatataaaaaaatagcagttattagtaactgttatttatttctaaattcttaatcaacttatttagaatcctattactaatcctgtagagataataaagacaataaatgcaaaagtaaaagacgatgaaattttaaaagttttactttcctctacaaccaccgtagtaacattagtgaaattaggtagagttccgttatgttgttttaaatatcctgtacttgagcaccttaaaatacttgttgtttttgaaactaatgtaacatttgttggggtacacgaagaactaatttttcgtttctcagtagtaaatacaatagtagtagttttattctcagtttcatttcttttaatcgtttgtatttttgaagtgataatatttttatttttacttttacattctctatcaccctcttttacatgctcttcgtatctttcgttttcctctgtaacttcttctttttctttaaccaatttttttctttattattagtttgttcttcttggttgatttctttattatcgtcagttgatgaatcattattaatgtttttaccttcatcaacattcacccatctttcatcttctttattctcgaccttttcctttatttccttttcttcctctttttttagttcaggcaatttatcttcaacatatttatccttttcattttgtgcagaatcattttctccacttttttatttttgctattttgctctccttcagtttggtcaagaatgtttttctcgttttcttgttcttcttgattaccgatataggcagttttgtcttttaaattttcctctgaagtgtgttgctcttctttttcatcatataaagaattcaaaatatcttcatactgttttgcgtttacaaattctggcatttcagggaaatcagcaaagataatatttgatgtcttgcttaatctttccataacactaggttgtaagaattccttatctagcctaactgttaatagacgtgtctcaatattgtcctcttgtgttccttcctcagttaaatgaatttttaactcttgacttaaactaaggcaagaaattgataataaagtaatggttaattgcttccacattatggtagttgtttgttttaattgtaatgtttaattatgtattttatttagaaatattatgtttcaaaagaaaaaaagtttctttctaatactatattcacaagaaataaaatttagaagtaatgaaagaaagaaacattttaatttagccttattctttatatattaaatcatattaatatattttaataaattatttattattttgcttttttctcattttgtgaatttgtgacactttgatattattaattatttgtagaaaaaatttaattttcctaaaatggaagcatgtaaatatccaactagaattagaataccaaaaaaatttataaaaatagggatctataaaatatataaaacaggcttaatatattatttactcacaatcacctctcaaataacaccactagatattattttgaaacctaccactaaaagcatcatgaaaccaataatataatctctcgaaaattactttttgtgcattgtggaatgcaattgtatgatctgaatcagggaatatctccatttcaaaatttctagcaccatgcaaaattagtttatccactaagtcgtatgtattttgaatatgaacattatcatctgcagtcccatgcattaacaggaatttattcagatttttgaatgcatcaatattggaaaccaacgcagtttgttcataacctttttgattatcttcaaatgaacccatatacctttctgtgtatatagaatcataatatttccaatttgttacaggcgcaacagcaacagcatatttaaatgttttaccttcatcaaattcaattgtctttaaagttgagaaacctccatatgaccaaccccaaattgctacgctatcttcatcaataatacctttattatgcttaataaatttccttgaaacttctgtaatgtctcgtggttcccagtatcccaatttccctgtcacccatgatcgaaactcccaacctttaccaccggttcctcttggctcaatttttaacacaatcgcatctaaacctgaaacaacggattcctccagtgatagagatgctttcttagtaaacgttgtagaaccaggactaccataaacactgactaacaaaggatatttctttttcaaatcaatgttagctggcttaatctcaataaaatcaatttctaccccaccatctaattccattgttttataacttgttataggatagtcatatttctttgataatttttctaaagcttgtacattaaataaattaatcaccaaatcactacttactagttcttcctctcccatagaaattatattatttgtacttcctgcccaagcttttggaaaatgaggacctaatcttctcataagtgtataccttgtactagagctaaattcaaaatcataatacatatctgcattatgtgggttttgtaaagttattacgcttttatcatttatgtcagttttgcttaaatgaactgcatacagatgctgacccatagttccaatcttatttgcggtgaagtacacaatattatcttcataattaatccagacagcacctgaattagtaacttcccaattaccaaatgttaattgaatacctactgaagtagtaatagtaggataataaaatatatgattaaatccattgaaatcctcatgaatatccaaataaccggagtcaactctatttttttgtttatctggtaataccggaacaactttcttggctttatcaatccacccattgaatttggaagcatccatagatctaactaacgtggtctcttcttttgcagcattatgatgtacgactctaagctttttagagcatctatcagtgatcttaaatataaaattacgattatcaatccattgcacatcgtaaagaatgaagtctttatcaacattcaatgttggaatcctactaataacacctgttttcatattaaacattaataaaactaatgatggatttgaactaccaggtttaggatattttatttcattgaatggggaatattgttcatttgttgtataaagtggaaatgtatataatggaacattggtatcattaaactgggcaaacacaaatgctgaatcatctggtgaccaccaaatagccttgtcatttgctaatacttcttcctcataaacccaatcaggaataccatttaaaatattttcacttgtatcaaaagtgatctgcacagttcctcttagattgttgtataatggttgcaaataaatattatttttataattgaaataaataaaattataatgaggtgaaaagtctgcatatgaaagctcaattggatcactataatctttccaaggtactaatggagttatttgaccgctttcaacatctcgtatccaatattgcccatatgaagaatatctgaatcgttgtctaatattggttcctaaaataactttatctaacttgtaactaacttttattatatccacctcgtattctacaccatcataattgaatttatttatccctaaatctttcttaaatgtaggtgaataaagttgtttagcaacaaatctaattgtactttcacctatattcctttctgtagtgaaatatagacctggatctttatcatatcgagttaaagtctctggaggtgtaataaaattaaatgtagattgttcaatattgaactcaccatttaatatattttcaatagtaaaatgacctttatttgaataattaatatgtgattttgaacttgaattcaacgtactattattatcagaagtatgaggataggtaataaaaattataattaatagaataccaaataagagagtaaaaacaaatggttttttgtcatgggcaaacttttcgttccaatatctcatttcccatatatttagagcagaagaatcgccgattgattgaatttccaagtcactggctattttaggtatattcgcggttgaaactgtctttgaattcatatatgagagactggcaggattagccacgcttgagctagaatttccatcaatgttagcaagctcaatatcatataaatttactgatgctcctgaagttacttgatccatgaataaatgactatttttcctcttgtggcccttttggaaatctccagttgacatgatcaaaatacttttttctcaattcccaaatcaacgtctttgtgttattgcaatatctatatttaatgtttcttctatgttggtctatttctttaaatatatatatttactggcaatgtagttatcacgtgtaatattttccatttttagaggttctggaatgttttcaacttctatttgattttaggctattatcattaatcgatatttcaggaaagttaaggatagagtaaataaaaagtttcaaaacttaattcgataaaacatgcatatgccacccacacagcaagcggaaaccaccgacatattacccacaacataactttaacaaaatgtggcttccaaggagagtgtaacttataaattcaaagtgtaaataaattcaactatataattctatataaaaagaaatataaaatatacgatgctatttgatcacctatgaatttatttaagcagaaccagccaaagcagcaatcttggcagcaacacgagcagctctttcttccttggtcaatttagcttgcttgtatttcttagattcagcagcatattgttccttggtgaatttcttttcagttggcttgaaagatgggtcagctctaatagcttcgtgagcggaagcgtaaatttcttctaaggagtcagcatcgatgtcatcagcaatgtaacccttgaataattcagcaaatctttcttcatcatcatcagctaattcttccatgtattcagcaacgtgaccaccgaagatgtagtttcttaataagtcagtgtctaattcttcggactcgaaatcccaacctgggaatctgttttcagagtgtggaatgtataaaccaccatcggaagcaccctttaaggcaccgaaaactctggcaccagtagtggttctttgtaaaccaacatctaagaagaccttgaatggtcttggaccgtcttcaacggcttcagttaattggtattcaccttcaacttcttcgacacccttgtaggtttcatccaaacctaacttttgtaaagttcttctggcaattaataaaccagtggcataagcagcagaccagttagttaaaccatgagtaataccgtatcttggtaattcgtgagagtaagcagcggccaagacaacatcaccagtgatggtggaagagacaatttgacaaatgatgtccttgttggtgaatctgacaactaatctgtactttggagagttgtacttagccttgtgttgagcgactagtctctttctttggtagtagtcagtcttaccttctcttcttcttctgaatggggtttggaaacgagagtggtaggcagagttcttgacttgttcaataaacatctttgttatataattgtctttaacttatctctagcaaggttcttcgttattgggtaaagaagaggagagacaattaggccataataactagaaagtaacggttaaagatccaatatataaggcagcattacacaaattttcccactaacatgcatacgttaacaaaataatatgccaaatggttacaactatgtcagagactcatcgcttcatacatagttttttctagtcttacattgtctgcaatcggaagaattattttccaaggagaaaatatgattctgacttcaaacaaaaacaaataaaaatagattttgaaattatggaaaaacaaagttgagtctaataaaatttccaacttgaccaagaaaaaattccgaaagtggtattttttctaaaatgcaaaaaaggtacaggtttttgatttaattagatattatccttttttttctaaagaaagcctgaaggaacaaaaataacagtcctgaaaataaatgtttgtgcttttttctatctgtttgcattaaaattttaacgggaaatgatatatgaaagactacgtaatataatgtataataaaagataattataatatctacaggcaagtaagttttgattcaattggcatgcttcttgtgttaacataactacagtattctgtcaagtacatgaaaatgataataataatgttcaattaataaaattctaaaaaaagtcattattttatttctactgatggatctctagtatcaataaccttaggagataagagttctgcattagctaacatcttctctgtttcctccttagaaataggttcacctttagccacagcttcagaaacagctgatccatctccataatgtgctctaaagaacgtgtagtgtaaaataatatcatctatatttctcatttttgggtcactagcaaaatctgggtcgatgaaaaaaaacactggcatatcaacttcttcgccagcagccagtttttgttcctcaaaacaaaaacactgaatcttgttaaaatatggtgcggcctcaccaggtgtgatactgtaggttgccattccaataatatccttatctgatttattttctgctttataaaaggaaagtgcagtctcccctggtaaaacataaacttctctttgttgaggaacaaatttccatggtaatatttgagatacttcactagtaaatgtcactttaatacgtttacctgtttcaactgggatcagcttatcatctgtaaatttacgcttatctgtaataggaatgccaccccatccagtacgagcacagatggccctgtatagagggactgcagtatatgtcagccctaaaaagaatatggcaatactagagaagtaatatacaatagtctgttgtttaaatttacgcttctctcgaattctaaagtctctcaaccttttaatatcttctctagataattttgaaagatctattggattagatgatgtcacatagttcctaactcttaataaacttgtacgtcttaaagtagattgaaatttaaaaatattcctttgtggaagaagatacttaaacatcttttgctaatcgcttatattgttctctctctctctctctatatatatatatatatgtgtgtgtgtggaagacaatgcttcttcaacgactaatcttgatgattgataagaacttagacaattatattaactactgtttatattgaatctttatagtccctcccccctttattcaaagcgcaatatcttttcaacctttaaagatctttaaatttcagtttgatatttttttttcggtatcaaaatgttattattattatcatcattattataacaattgtttagtctatcaaaacacacatagacaaacatacagaaaaaaaaagatcctattatgagcaattatgatcaaatttgaaaataatattagtttatagactgtatcaacagaaataatttccaaattcagtatatgctgttttaaactagtagggtatgcctgatttaccacaagtcataaaatataatgatcaacagtataatatgagaaagattaaaaaagccaagtcttgtattttttgtagacgttcccatgtggtttgtgatgagcaaagaccttgctcacgttgtataaaaagagagattgcacatctatgttcctcaaaagaattaccacttgacaattcctctccacatctagagactcctatcttaattccatcaccacagaatcaaactcaaattaaccaactagaacatccaggcaataatgttagtaagagtcttcttttccctccacagtcgtttgtatcacaaaatatgggatctgaattcagctctattaatgaattcctatccatcttagaagatccattggtcatcgtaccagattctaacctgcaggaatcttttcaatcaaatttaactctttcagatacaagctctcctaatatacataatggttctatagacacaaacacaaatatttctaacatgacgacaacgacaacacaatcattattaccacagaaaataccgttatcaacacctcaggcatccacaacacacactgttgcaaatagcaatgacaatgcaactacagccaaggaacaatttttcattactgctgctgatccagctattgagatcacaccgaaagaaaagttaaagctggtaattaatgccaaagttgaagcgggtttgttgaaaccatacaattacggtaagggttacacaagattgcaagaatatatggaccgcacaatgtctcctgaatcacataaacgtatcttacagccattaagctcaattagacctgcatttagatcaattgcaagatcattaaaagatgtggatctagtattggttgaagaggcatttgaaagaatgttgttgagttatgatcgggtattcacttccatgagtatgcctgcttgcctttggagacgaacaggtgagatatacagagctaataaggagtttgcatccattgtaggatacacagtagatgatttacgtgacggaaaattagcaatatatgaattaatgaatgaggacagtacagtaaattattgggagaaatatgggtcaattgcatttgataaaggtcaaaagactgtattaactacatgtacgttaaaggataagaactgcagcgatgttgagtgttgttttagtttcactataagacgggatagatataatatgccagtatgtattattggcaactttattccaattacatagacacatgttgttaaataatcaccaattcacaggaacaacctatgtaaattgtatattgaagaaaaaaaaaagaaaagagaatagggaacacatgactccacttttatcattatttaacaataaatcaatcaactagattatcttacccgttcatataatatgtatatacatatatatagatatattctttttcttttatcttttatacttggtcattggattacctttgtagacaatagattatcatgtaatcttctctttttggtcacaacttctcaaaagtctactatcatacagacagttgaaaaataatagagaatcatggggaaaaacaaaactacaaatgagaatgacagaagattctacctatatttcttctgtacacctatgtactgcctccaaattccaaaatggaagtattccaagacacttgaaaatgttcacacgcaaattttttatgtattatgtatatccaataacatataagttaaagatgcgataacaaatgagtcttcaaagacacggatgacttttgaccggtctcatgactacaactaatagagaaatcaatgaatcaatcaaacctaaacatgttttctttgtttttttcttttcttttgcataaacaatactaatataccattattatgttacggtaaacgggcgagatgaaaaattattatggtagcgccataaatattacttctttaaattctactacgatcagttgttgtggagccatggaaaaccaccaccttgttgactctcaaagagagatgaatcaatcgtaatattttgtttagtattatattccattaaagttgaaagattgttctctatttctctctattgccactgtaattgtccaagttccactgtattttattcgactttgttttttttttgtttaccgtttttctcgctttcccgttgtttgaacaaataatttccttggaataggacaaaccggcggagaggaggccggtttaataatagtgaatcattcttatcaatacacacgctgttatagtgttacactcaattcgagcaacaaacataataaatacaaactgtgcaccaaacattaatctctttatatataaacgcgttgctcttcttgctttatgtaagtttctctttaactttcgaccattgctaagttacttgcttggagaaaatcgtttccctcaaataggaaagggtatatatacttcaatcacacaactcaacaaagttatacgggaataactagatctaatctcttaagaaacatcatacaataaagggataaccacacaaatttaataatcttcctctcttctttttacttgttatcgtcccaagatgtctcaaacaaatgccacaaatgcaaaggagccattacctttcgcataccaattctttgcgggtgctgtcgcaggtatctcagaattattagtaatgtatccattagatgttgtcaagacaagaatgcaattacagacgaattctctaagtccagatgcataccgtgggctgttcgattgtcttggaaaaattgtcaaaagagaaggtgcaaaacaactatataaaggtataacttctcccattttcatggaagcaccaaaacgtgccactaaatttgcgtttaatgaaaaatttcaaaaagtatatggttcattatttggtttaaggaaaggtgaagtgaaccaaacagtatctatattaagtggtgcatctgcaggtgtcacagaagcatgtgttatcgttccgtttgaactagtcaaagtgaaattgcaagatgtaacatcaaaacaatttaatggtccaatagatgtagttagaaagattcttaaaacggaaggtatattgggtttgtatagtggtcttgaagctacaatttggaggcatgcattatggaattctggttattttggtgtcattttccaggtcagatctttgctacctaaagtggagagtcgtgtagataagattagaaacgatttgattgcaggtactgtaggtggtacagttggttgtatatttaatacaccatttgatgttgttaaatcacgtatccaaagtgatagtaattgtgtaacagatccaaataacccattgaaagttatcaagaaatataattggtctgtgccagctgtgaaaacaatatatcaagaagaagggtttgctgcattgtacaaaggttttgttccaaaaattgcacgtttaggcccaggtggtggtatcctattaattgtattcggtggagtcactgaattccttcaaaagctaagagaataaacttgacgaaagaaagaaaaaaagaaaaaaagaaggaagaagtagaagaaaaatgtttattactaacatgctaaacgatatagtgttggttgaatcccttcataaatatacaattgaaaactaactatgtatatataatcaacaacaagaagaaagacatgttacattatgcatgtgcgttatgagagtccttaagttcatatttgttttcctccctcttacttatttatttacttatttatcattattatctagcaatgtgactatttagaattcctaatgaaccttcttcatattcaacttcatgaaatatctttcaaaacaaaacaaaaaaaattataaaactattcctcattattattattcaactgatgatagttttcttcttatttaatcctagctatataatattgatagagataagagccgataggataaaatagaaaaataccctaaccatatacccttatgaccaacaataaatcctgacatactttcgccaaagtctcgacctaaaaatttaccccactttttttttaacacaacagtattaaaaaaattcatgtccttttttctttttttttttaatatttcgctctaattttctcagtttccattctttggttttcctattttgtcttattttctgcatttattaccaaactgagaaaattttgcaaattccaattagggttcaaagtcgaacacctaaaacaacatcctcggagagggggccgtaagagaaaaaaaaaagaaagaaagaaactgaaatagaaggaaattcttaaccgttcaagcccacaattttttgctattttttttaatggtctactagagtatagttaccatcattattactaatcttattacgatacctgcttcaactgttagatgacagacaacaaggctatcattctacatgtttgcggaattatatagtaaataaagagagacttgcaaactgtgaactagaaaaataaaaaaaagaaaaaagaaaaaacaaataaaaaaagaataaaagatacattagattcaaattattaaaaatatcttgatattgtaaatatatgtgcaatactatcttatctagagacaaatttaattaaaataagtgatagtaattaaaacatcgcgttctgcaaaattctaatatttaattgaactggcattttttttctgttttcggtattacctatctctcttcggatcaaaaaatataaacattatttgattaagccgatttcaattgctctgaatattcaatctatcaatcttaaattttttttgattatttttaattaagattaattcatgtgttagaagataataacctctttcacacctaaacaacaacaagctcattataataattataaattgacgctcccgctaaatgggtagagtttgatacatatcatatacatacataattatattcctttgtcacacctatatttgtgttcatttatacacactaacatagaaaaaaatttataaaccaaacaaaaaaaaaatgagccagcaaatctcattgaaccaaagtcctgaagattatgatatacccctagattggttatacaaaggcaaatcaaataaattgaagaaaaataaaatatcctcatctgttataaagaccactgagtcattcttaaatagtaatagcagcagtatctcatctgcaaaggtatctccaaatgtaagcagtacctcaaatggtgtgaaaaatagaacaagatcgatatctgtgtctaatgctgcattacaatcaaaaaattcttataatgattcgtcttcctccgtttcacaaaacattttgatgaccccagtgataaaaaaaggtagatcttcttcttctacagtaaaaaacaagcctgttctatctataccaacaccaaattcacaaattaaaagatcttccccaatatcagaagatcatggatcatccaatactccatctatatccatttcttctagcaccaagaaatctctctttggttctctttttggaaaaatatcagcttcaaagactccatctcctacaactaaaaacatttcaaatattaccacctctactactcctaccacaaaaaattcagtcagttataattctgagaaaaatccaataaataaaaaaacagtgacgcctatacaacaaacccctataaatgaagtagcttctccctccatacagtcacttttacagccgtcctcttcagtttcacatatttcctcctcttcttcatcttcttcatcaacttttgaaaagagcactacaccaactaatacaaattcctcaatatcatctaatgaatctgtcctagatttatcaagtattaaattgaaaagagtaactttcagtgtcgacaagtttaatggtgacccaccacaacaattaccaacaagaaagcctaaacaaggtaatatcttggttccccatgatcttttatctgaggttccctccatctccatgggaatttcaaatactattaaagatagtactcatggcaatgctaccactaataatagttcaatacttgttaaaaattctaaagaatatgagattgccatggaaaattacaaaaaaatgctgcaagagactgaaaaacatcaacaagaagcgcatgcagcagcattaagaatagcaagggaagtggagaatttttcaaatactggatctcaagctacaacaaataatacctcaatagggaatactatcgatgataaatattcaagtgcaaataatcaggaaaattctaaaataatgaattttgaaatagataaaccaatacatatcaatgagcatcctttccaagaaacagaagatacaatagtttcagagaagaatttaacacttgatgtcatatatactagatgttgtcatttaagagaaattttgccaattccatcaacattaagacaagttaagggaaagacagcacctttacaagtattgaaatttttgaatccaaagcctactttaattgatattctatcgttttgtgatttcatatcgatcgtaccaattaacactattatttttgataatgtcaatttatcaaatgaaatgtttgctattttgattaaatctatcgtcaaatcgcaagtattggaaaaattttcattgaaaaatgttctaattacaaaagaaaattggacaattctctgtaaatttttattaattaacaaatctttaatcaagctggatttgtcacaaacacacctgaaattcaaattgacagatcatgttacaaatcaaatagacaaaaacgataatgacttaaattgtctaagacacaatatggattgggatttatttgctaaagtgataactataaggcaaggaaaaccattggaagaattattattgaatggtatcaaatttaataacataccattggaaaaatttaacaatttattaaattcgattactaagcaaacatgtttacaatcatcgaaaaatactaagatagttaaatgccgtcttggtttggcaaattctaatatttcctctgattgccttaaatccatttttaactgggtatcttctaagaaccaacattcacatgaaagtataattgtacaaggagttgatttttcatttaatgacttatcacaatatgccaaatctatggttacaagattatcatctttaccctttgaaaacttggagtttttctcattaaacagtacaaatattttaaaagcttatgatatggctttattattaaaatacctatctcaattgccaaatttgaaagttttggatttgagtaacttaccacatctttttcctgatgtactaccttatatttacaaatatctccctagatttccaactttaaaagtattaaatatcgataataataatctaacttataaacaaatgggtgtcatttgtaatattctgatcaaatgcaaatcattaagtaatctatcattgatgcaaccaactgtgcattttaaaggtcaggatgcttttatggaaccagtagataaccatactaccaataatagtgaaggaaccacaaatgattcagctaaaccaaaatttgcaatgaatgggttgtgggcatcattatatcgacttgtaagagattcgccgaatttgattagtttagatgtaaattttgaagaagcacctgaagaaattgagtccagaatcgctttatgtttaatgagaaatatgaataagaagatggatgctgatttccaattagatgaattaactgtacaggatgacttattatttgatggtgaattgatcacaggtggtgctgagatgatttttaagaaattaaataaattaatttctgagggtgaaggagctagtgacctaggggaaaagagtggtaagacgggcgttaatgctaaaaaatatttactgaaaaagtattttgaaaacttgtataacgtccatgagaatgttatccaaaaaattgattgtttatttgataaaagaaattctggtgaattaactatgaaagagaaagaaaacctgttaagatttgttatgttagaaaagaatctcgcacatatttttcaaatttttgatcattctccatatttagctgcaattattgattctctgaaagtgaaacactatgttcaaagaagacattgtgctggctccactggtatgtacggaactgctgatcatgaaatcgatgtgacaaatccagcaactgatgcagtaccagaaactagaccacatttaatggcaacggactcaggcagaactgttgattgtttaactggtaaacctgttttatttcgtcgcagttctactacttcaattcaagggaaagtccaacaagaagaagaaggtgaattacataaatggggttttttcgttcaacaacagaatatgctttatccagaaggcactgttacaaatatagaatctaattcaaataataccaaggagattatgaaacaaggaaatgaaactcctggaacaagcatgtcaactccattatatattcctttggaaacaagaaagagattgatcactaaagttccatctggtgatgaattaagagctgcaattatgaaagctaaaggtatagattcaattcaagatttaattcaaaatgttagtgatgaaccgcttgcattagagtcaatctatggggattctgtaaaagtcaatgaaacatatgataaacttcttaataatctttcagcaaatagatcagctaaataaaaaactacggcatatatatctactaggtagaatatcagcgatatatcttaacttatgtttattatgtctcttgtactacagatattatgtatatcccagtaaataataaaatattaatgataatatatggaggaatataagatgatacttgttttctagatagcttagaaaaatctcaacatacttttttaaaaagaagatgtaagtaagaaatgtattatacatattgtgcctcaataacattctctatttcaattaatattactgtattctttcttattattaatttgatttccacatgcatattattcttttattgctaaggtaatttgctttctgtatccatcagtgtctttctatttcttatgaggatcaatttaatattatcctgtgtatttactttgatatgtgataattagattactatcaaattgtggattatgttaacgactttatcaagtattacaattttagtattttctctcttttttttcaaactttatatatctatataactagaagagtctaaggaggatgaattcgtttgaaggatgtaatgctttatttttacataactttctcatgttgaattacggatagtttgcctgtttaagcaatgttctttatttaatttcgataatgttttattttaaagtggaggtattatgctgtttataatctagtagttacctttttaacatcgaagaaatatctagggcaataaatacaaacaattaggtgaaccagagatctcataaacttttacaataacaatcagtttactgcaaattatagtctaggtatattacacgtatatatgatatactcaaagaaaatagtatcataatctaaaaaaatatgatttacctcttttaatttatggaagaaactattatttatttgctactaatatgatcttgaaatattgttttttctttatcaacactgtttgtagaaatcattgtattaactatacatcatactactattattgattattatcatgcattaaggatattcctttaaaacgtatcttgtttgttattagcactttcttcgactaggtatcgtacctattattttacaaaaataagattcgcaagtaatcaacagaaaaaaaaataaaagcgttaaatagtattacatcattttctagaaagtaacgaggtgatgatgacatttgaataaatcagtaaaaacctattactttaaactttatttatagggagtcaactgcaataaagaaaatagttattaaagttttgaatacacatatattttattagtactttaaagtatatttttttaaagagaagtaatgtctatatttccaagctggtgtcctccatattcttcattaaaaatagatccagacactcaagaggaactgtattgcatatgtaagaaaccagatgaaggtgatttgatggtaggttgtgatggatgtgatgattggttccattttaagtgtgtcaaaattcctgaaaaatattcacatttagtactaaattattattgtccttattgtcaagctggtatcactgggaagccttctgcaaatggagaattacccaaaattaaatggaaaagaaaatgtcgattagagacttgttttgacccctgtcaagatcatagtaaatattgctctgaagcgcatggaaaattgtatatgcatgatttgctagaaaaagcgtctattccaaaaagagatgcgaagaagtttgttggagatatgatgtggggatgtcaaaatgatgtgaggaaatttcaagaaatggcatctaaagattttctaagtaaagatgtcccagatcttatgatggatcatgatttgtttaacaggatgattaaaaatgataaaaatctacaagtattacaagaacagattgagaaatacaaaaataaaatgtatcctgaagttaaatctaagctggatgtgttacaagactatatagcatggttagaatcaataacaaaacagttgaacaatgagaccgcagttgatgaaacagacgatgatccaactaaaaccaacgacaacaagcaaggaaagaacagaagaaagaaacaaaaaaaataacacacgacgtaaaatgaaaaaaatatgtgggttcagccatgatttgaccataatcacggcgataacaccggaggattttattacacaataccataagttaatggaagtggatgataattataaccaggagactctaaatggtatatgtgtgaaattaaaatgtaatcgacactctgaatggacatccatgaaaatggatcaactaaagcagcaactaagatcattagaaaatcataaggagagattagatatacttcttaagactagaataaaacaactgcacattcaatactatgaacaactatcatcaacaagaatctccgaactctcatcataaaaacagcaattaagttgataacggtttaaagagctgaatatacaagtaatcctatatacatttataagatcatgtcctttgcatatagctgttgttttaactattttcttgcgtagttttgtgtatctgaatttatttttttcttttttcttttttcttttctctttttttttgtttttatttttttcgtctctttttctgggggggggggaaatagaatttaccaaaattgaacatgaaggaaaacaaaaaataaaagaattgacttttataaaaagaagaatacttacacaatatatgtttaaacttgcaattatcattgtaacacaagagaagaaaatatcaaggagcttcaacattgaataatcgttaatacattagtgccagaaaatacccagttaatatagcagacccaatgaccacagtgtcttcaaatataattactgaaaacaagcttaaaaatgaagaatataaaatttggaaaaaagtagttccttcattataccaacatataataaccttcaaaccaattttcagcgacatcccaactgagcaaattgaaaatttatgtaaatgtatcaattttactgataaaattattaatgatagcaatggtaatgggacactcaccacttctgcattttgttcattaggtgataaaatatatgagtttgatttcactttacccttaggcgcatatgataccactaatagtgatggccccttacctgaccccaaatataatgatcatgagatatcctatattgcagaagagaccaaatataatagtaaatggatttggtcaggggaaactattataaaattggtacctttatctgaaaagaaattcttggcgttatcaaaaagtggttcagttgctatttttcaagatggttctgaatcccctcttaaggcggttatggatacttctactgagaggaatgatgatattattgttgacatggatgtgtctaaagatttaaagagtataataaaaactaaaagtaatctaattacgcatcaaacaattgtggaaattattgataatgcaactacatggggcaataaagttgtctctataagtctaaatgacattcttattaatcaaatattattcttgaataatgaaaatgatgatacatcaggtaaggaaaactgtgggtttattgctttgggtaacgagaatcaagtatatatatggaacaatatttcgcaacaaaatcaagaacccaattttactttaaaagtagaaaataatatattgcatatatcgatttcaccatttattccaacactatttgcattaggatttgtaaatggttctttaagattctatgatattcgaaacataaaggcacaagacccatcacacgttaaggaaaattatttatttgaattaaatcaattaaatgaagatcctgtggtaaatataattttttctgaggtttctccatttgaattactctccattggaaaatcaggtaatgtatatcattggaacctagaatatgtatttaaccaagtaaatagggaaggatttgacaatcttgaaggtgaatttataaatcagagagcagtacaaagtgaatgcttaactttttatcatactggaggtgcacgcagatcatttggtctcgggtcatgtaaaaattccgtaagttaccatccattaatcgatgattttgtagtaacagtagataacgatggttcactttcagtatacaaaccatgcattggaagatatttactagaggaagaatcagaagatggtgaagataatagtaataataatgacaataatcttaatagtgataatgtcaattagaacttattcgaaagggaaaataacaataatattacctaacaacaaatccttgattgaactatcccctatatccattttgtatgcatgtatatatataagttgaactatttattttgacatatatactatctatagcacatacaaatcaagaatcaaaagttattttataatagtatcaatgatagcagtagccctaacaacgacggtaataattatgacatcatttttgataagggaaacatctttcgcgatttcaaccattaatcccgaatcaggaaacatatcaacatgacctaaaacagaaaaacatcgaaattatcatcgaattcctttttttaaatttttttttttgaaattttataattttttttttgatttttgttttctttgaggcaagaaaaatctcttaaatgggagatctattcacctaatgctataagaatagtaacaacgttactataaaataaacaagaaacatcttatttagcattgattcccaagaaaaaagaaaacaagaacctttttgctttgattttttatactgtgtcccagtatttatctatacatcaatctttttcagtggtagcttgatttttggtataaatccaaaaaacatagcatactaaaagtaatagctatctcttttataggcatattagttaaaataaaaaaataaataaatcacaggctactttttgatcctttatacttcgctattccagtattggatttattccattatcaagaccgccaaatacccccttgaggcatatttataatcattggtcctttgatatcgctttttccatccataataggaaacattttttagaatcatataaatagagcttttgatccactaatctttatttattttctcattccacctattttaccaccttgtatattaatataatttgatcattactactaccactattattatcataaagattatttatctaatattaatatattgcattaataatactaattattagtttctatttttaacttatttttttccattttgcataatcattatttcctatttaggtaatataataaacataaaaaattcaacaatattgatattaataaaaaataaaatataactaaagcatagcatattagcctaaacataatacataaatttatatcgagaatgagtacgtttcagaattgtcgtcatactcactatggtggaactatactaacctcaccttcttcggtatcacataatcgtaagcataatcaaaatcaaatatcatcacatcctcaaaaatttccaacctttggcccatacatcgtggggtctacattgggacaaggtgaatttggaaaggttaaattgggttggtccaaagtaaatagtagtaatggtgattatacaaaaatatcaaaacaagtggctattaaattgattaaacgagataccttaattaatgataaaagtaaagagatcaaaatatatagagagataaacgctttaaaacaatctagtcatccaaatatagttcggttggaggaagtgttgcaaaattcaaaatatattggtatagtattagaatatgcatctggtggagaaatctataaatacatccaaaagcgaagatgcttgaaagaaaatgtcgcatgcaaattattttctcaattaattagtggtgtcaagtatattcattcaaaggggttggtacatagagatttgaaattggagaatctcttattggacaagaacgaaaatttgattattactgattttggatttgtcaatgaatattattcaaataatggaatgatggaaacttcgtgtggttctccatgctatgctgcacctgaactagttattagtaataagccatatgatgcaaggaaagcagatatatggtcatgtggaattattttgtttgcgatgttagctggttatttaccatgggatgatgattcagaaaacccagatggtgaagatatcgctagattatattattatatagtgaacactccattaaaatttcctgattatattgcaccaatcccaagagacctgttgcgacgtattcttgtagtaaaaccttcaaaaagaattgctattgaacaaatatgccaccattcttggctatccccatatttatccatgttatcaataaccgcacaagaatgggataaaatatatgaatctaaagaccttctgaggataccaaaacatcataaacaatacagccaacggccacactcaatatgttctactgcatctaattattcaaaaggtacgagtaatggtaataatagtaatactgaaaagagaaattcattaattatggataatacattgtatgcttttccagctccaccaagagaataccaatctcatgtattagctattccttcagcgccgtcgcctgaattaagagctatgaatagtagatctccggggaaacgtggccataatagaagcaattccgctgcttcacttgccttgcaagctgtagttgatgctgacagacaacattttacatcaacttcttctttttcttctttttcttcttatactactaataacaacaacaataatagtactaatattcctaatcacagcaataataatagcaatagccaatataatagtagaaatgccgatagtaatttcattacaccagtgtgcttatcggaacttaataatgagcaaattaatttaagtcccttaaaattagatgattcaaaattaaagaattcagcttttgtatccagttatattagatataacaacggaaataaatccaggatttcatattcacaatcgagaaaaccaagaccaacttcgtactatccaggtttaatctccgaaaataatcatgtctcattactgtcatcttcatcatattcatcgatctccattacaccattacgtggacaacatttgcagaaaagtgattcgaatgcaaataaatctccatttgattcgatccccaatcttggtacagatactgctgtgacttcaatgacagaaattactgaagatgaagattgtggcaagaaactagatgatataaaaaagataaacggtgaatcaccaaaattagtggctaggaaaacatcatcaatattcagtaaggtatctgttgatacagatgttaatgctagtggagatataatgaaaataaatggagatatcgaaacattaattaaaagggtacaagaacatatcataatcgatgaaaatgaaaaggaaaaggaaaaggaaagtgaaattgaaaattgtaaaaatacaaaatctggaagaccatgcagtatgtatactaccacaacaacaacatcatcatcagtacacaagacgatttcacctaccatcaaagaaatatctaacaacattttatcaaagaaaaacaatgggattgatgtaaatgttgaacaactaaatgataacatgagtaaatcaaagagtaatataaataagcataggtacaagcgttcaaatgttagacataatattaaaagaacatccatgatagttacacagcctgtaataattgaggatgagacaccaacatatgagtccataaatgtaacgtctgcgccacataattatcaaaccatttctagaacaagaaaagtgattgattttttcaagcgtagaagtatgaaaatatagtaaatatagaatatatatatccgtatacactaacaacaccattatatacattcacattaatcaataagaaactttaaacaagaaaagaacaagcaccctcttaaacacaatacaatacataaaacagaaaagaaaaaaaggaatcaaaaaataaatgtaatacaccaatattttaacgaaaaaaagaataaaaaagaaaaatttacaatcggagtttcgttcaaatatgaagtaattcgttaaatatgataatatgatcgttaaagttaaaaaacaaaattgaattaaattaaataaaatagtgtgccgtgttacatgatattaatggtgtattttaatatacaaaacaaacggaaaatgaaaggaaaacaagcggaaatctgtcgacaaaccggcggaaacaccaagagaaaaaatcggctgactaacaatttttttctgtttttttatttcttttctgtttgttttttcgtgtgggttttgtttttcgtcatttcttttaattgtttcttaaatcactcagaaggaaggaaagttttcaaagaatttcaacaaaatcaaaacaagcggatatattgatgataataattataaaaaaaaaaaaaaaagaaaaagaaaaagaaagaaagaaaaaataaaagaaaacagaaaacaaagatttattaagatttatattttgctttgctcctttttacttattagtgtgtggattttaccagttatttaattctttctatcggatatttttttctgggatttccaatctattagatattagtatatttacagttatttggcactgctgttaatttttagtaagtcaacgtttttataataccaaagaccaagtagagaaacaaaaagaagaacaagaagacagtataacgatcctctactctttttatctttttttactttttttcttttttcaattgtatttttattttggtttggaatttgctcacaatacactagaatataataattaatatccctttcactatcatagattcgtcatgtctcaatatgctagtagttctacatggacttcatttttgaagtcaattgcatccttcaatggtgatttatcttctttaactgctcccccatttattctagctccaatctctttaacagaattctctcaatattgggctgaacacccagatttgtttttgaatccttcttttgttgatgatacaaattttaaagattatgttaaagatttagatgaaaatgttgaatctccagaaattgcaagaatgcttctagttaccaaatggttcatttcaactttgaaatcccaatactgttcaagaaatgaaactatgggttctgaaaagaagcctttaaacccatttttaggtgaattgtttgttggtaagtgggaaaataaagttaatccagcttttggtgagactgtccttttaagtgaacaggtctctcatcatcctccagtcactgcatacactatcttcaatgacaaaaataacatcaaattacaaggttataatcaagttaaagcttctttcacaaaatctttaatgttgaccgttaaacaatacggtcatactatcttgaacgtgaagggtgagcactatttaatgactccaccgcctttacatatcgaagggatcttaatggcatctccatttgttgaattagatggtaaatcatacattcaaggttcaaatgatctattcaccgtcatcgaattctctggtagaggttatttctccggtaagaagaattccttcaaggctaaaatctatcaaaactctgatgattggtcaagtaagagtaaagatccaatatataccatttctggtcaatggtctggtcaatctactttggttaaaaacttaccaaatggcaaaaagactgatcctgtgttattctatgatgctgaaaagtgtgttgccgaacatttatacgttaagccaattgaagatcaacatcctttagaatccagaaaggcttggttacctactgcagaagccatcaaagctaatgattttgaaggcatttcaaaggcaaaaactgaattagaagaaagccaaagagaattaagaagacaagaagaagctaagggtattagctggcaaagacgttggtttagtgatgtcgattactctgacgatgtaaataataaaaatgaaaacaatgacgaaaatacaaacaatgatgatgaaagcaacaaaaatgatcatgttaaagaacgtccacaacctgatgatattttcattaaattggcatccaaattcaatctatcgactaagaatgtcccaagtggaactttgataggcgataaagaagataagaaggaaggtttacaatctattcactggagatttaagagagagttatgggacaatgaacaagaaattgttttgtaaagttaggaaacaagaggaaaggagttgaaagatattaatagattaatttttttttaaaaaaaataaaaaattatgaaggaagttgatgtgttggcattgtttttcattatgttccttattcttttttgttatttctgtcactttagtattattttctaacatgttttatcttttcttttgtcttttttcaagtagtgttataattatgagaattttctttttgtaatactttgaagcaattttattatttgtataattgaaaatgaaataagatcttaatgaaacaatttaagtattgttgttatagaatttcaagttaccactattatatatgttgaattcaaaagtttgaggcttacgtatagccaagtgaatatttattttttgttttatttttttttaggtttattactacgttatttgacaataataactatatcacctttaaatatatatacataaatatcttcaagcagttcaaatagttctattgttaattagtatcaattccatttcttttcttttaactccttactcgagaaattaacacgtttctcttttcattaattttgttagaaaaaaattaaaaaaaaaattgtcttttagattctctagaaaaaaaaatatggaaaattttctgaaatggaaaacacttaaaattttattatgcgttataatgtaccaaaaagttttttttctttttgcgatgagcttcatttcttaataccatgtttagttgtttctccatcaatgctggttatattctagtgtttgtcttgacactattatttcttatctgtccggtcctttagtagttgaatgtctaatagacacgatataaagcagtaagtgagaataaaagaaaaaagatattgcatttgtgaattgcaagattatattattctatcctttacatatcagtacttattttctttgtcttatccacactgcatataacaatgtctgtatcagatagacctcaacagtataaacaatcttctagaaagggaaagaaagcatggagaaaaaatattgatttgacagatattgaaaaatccattgaaaagaaaattgatttggagataacacatggtacaaaagatatagcagaactggatgaccaatctttattccgagttgatactgaaggtgatgagatcttaaaatcaaaattgattaaaagaaagcaaattaaaaagaacttgaagagttctgaaattttagattctattaaaagtaaatctaaagttgatgcgcttttgcatccattacacagttctgctgaaaaaattactaaaaataaaaaaagtgttcaaggggtctctaagaaagaattgaataaattgatggcattagctggtaaacgaattggtgaatctaagttgaaaaatagaatcgacaaggaaggtttggttaagtcagatccacacgatatatggaatgataacgactcttctgttattgttagcaaaaagaaagtagtgtctcgttctggtattgtagtgaaatctcctgaaccagtatttaaagatcttatagacaaatccacaactggttggtcagtagctacagtagttccagatactttaaaacaaaaacctattcaaattagagaagtagaaactattccacatgcaggtaaatcatataatccatctaaaaaagaatggtctgctttaatagaaagggaatataatattgagaaagtgaaagaagaacaaagaatacaaatggaagtttatagggaaaagattaaacatttaatggaaactcttgacgataatgaggaggaagatgaagaggatgatgatgaagatgaagagctagatgattctgttgatcaaaataatgaggaggacttaaccaaattatctgtgaatgcgccaactaagaataaaaagaaaactaagtatcaaagaaataaagcaaagagacatgaagagaaagtaagattgcatcaagaactgaaaaaactaaggaagcagttacatgagttagaaaaggttgaagaatatagtgaagaacttgaaaaatcaatggcaaccattggctcttcaattgaaaagatagaaggaaaaagaaagcataataggaacaaattaggtacaaaatatggggtcctagaagaaagattagagattaaattcagtgatgaattatctgactcattaagaaaattaaaaccggaaggtaatcttctgtacgataatgtgagaaaactacaaagctcaggcaaaattgagtcacgtattccaattaccagaagaaagggtaaaaagaaggttactgaaaaatgggcttacaaagattttaaataattgtaaattacaattcaagtatatcattatcaaaaataaacttatataagaaagtcagagaactatttaatgacattacattgtgaaataataaatactagttatttaaaggaggtgacaggttattcttgaagcatatataaaaacataagcatattgatgcgtcgatattatttgatttgtatattagtaatgactgacattgtatcaaagaataatcatttcaaggaatattataattgatttgtcgatttttttctcttttctttataaggaataatattaacagtagaggatctattcttgattatttaaacctaaaaggagttatttataactcatactaagaactgagtgtatatttcaggtattttaattacattttgggaaattatatgcagaagaacacagctagatttatcaacttgtaattatataacctttcaaagggattattcacaagtataactctgataaaatcacctttgaattcactctaacacaattaattaatatactaagcacaatagggtctatgactgagaagttgttaacaatcctctattttataaacctacgaaaaattatggaatcaccaaattgtttcatgatctaaatccaattaatcaataattttcaaaatttgaggtaccagttccttatattaaaacgccaaataaatcattgaatttattggcagttctaagagttctcaatgtgaaaatagagtaaattctattattataggacttgttattggctcctaagatttcatattaactttattaatatatgctaatattttggatgtaggtattatgcaaggttgtttctctgatcatgaaacaataattatggatacctccgtagagattatagagaaatcaatggatgtagttaagacattacgtaatgaggataacagttaacaaatgctatccggtaaatactccaaatatacctttcatacataaattactatttatagatagagtttattattaactctaaactgagataatgattatttctttagtgatctaagcaaaggaaatttataaaatttttaataaataaaacttttttttattatatattctgggaaatatgaatctgtactcttattgtagataagatgaaagaaatcactaaataacactgttggtgcaaatatcgtgaattaatcaaaggtaccaacataatattagtaataaagaattataagagtagttatgtgaaatgatcagtggatttttcaatgaatttaacttgtgatcgtgaaatttgttgcaattttattatttataattttttatacttagttgttgatattaattaataataccatactgtttatatgtgcatactatgtgattttgaactttttataagattgtgcttgtttcataataaattacatcaaaaaaatactgaaacaatttcacacggtatctatgtgatagtactataattagatgtatagttagtaatataatcaggtcattcttactccacaacaaaaaagctataagttttagatttcttcaataataatgattaaaggaatcggtgttgatatagtacatatccctcgaatattagagctaataaacaaatattcaactaaaaagtcaactcttaatgcaattgcaaggaaagttatgtgttctcgtgagagagaaaagtttcaaaacttaatgagaaatttggatgtccattgtgaagtacaaaaacaacaatgcgttacatatatggctggtatttgggctactaaggaggcattatataaatctatgacccatttcattccaccacatgatatgctgccagcacaaatgatttacactaagttattttataagtcgaataatcaaatcacaggagcacctcaagttcaaattgtaaatccattgactactgagtgtcaactgctgtatgaaaaatatttaaaagatactaacattttgctgtctatttcacatgatggcgaatatttgattgcatatacttcaatatgtgcttcttaataatatattaatgaagtttcaaatagatacgtgtatatgaatatgtagatagatctataatatatttacgtatttgcgtaaatgctttgattcaaaagggaaagggtaatgttataatattcaattatatgcaattattatgtgaagaaaaccgtctatgcttaataaagatgtgtatagtgtataaatagattcgtctagctggagtataataccttgtgctaataatacagcattgaaatttccattcttatcaaataaatctgggaattcttttgatactgggtcctttagtgttatatcttcaagtccatcataactatcatttgaggtattaaattttagaacaggttggataggacccataaattcattatttatagagtttaccatatgaaattgaataggaaccattctaaatcctagtattgttgaagggattatactcttggaaattttttgaaattgtatactatttctactctttactgaattccaaaatgcaactgtatcatttctactcaaagacattagtaacttagaagaacctgtcatgatgaaacacgcttgcttccacctatgcatccagtaagattctacttgtttttccccatcaatcaatggaattacaccactagatatttcttcatttgttttatttgaatctatataatgtaatgtaataggccatacattaattatattatttgtaaacttggcataatttttagagtctctagatattattactgatgccattgttatatcaaacatgacaccaataggcaaaaaccatggtaatactttattttcaaaggtgaaccagcaacgagaagacatatgatcaatatcatcagacactaaatataattgtaagtacttgagaatttgtgttaaatacataggtaagtatgcttctctaggcaatctcaaatttaaatatggcttatctgacacatggtaattagagttctgagaagaactatgttgtttactaattaatattgagttgtgcaggtatatctgaacattgattttaccttcccagagcaagtcacgcacagtgttcataaaaaatctacgaaattctaattcacttgcaatttctctttgatatatattttattctgttcgtcttggggtagagttctaacttgcttgcttctaacgtctatttttaataaacgctctatcgattagtgaggctatcaattttgaaatactatctatttgaacgcctgaacttctttatagtaaaaaaagcataagcaaatcacttcctgatattttgatcagtctgtatctatttctacaagtctctgctattagtttctacatatcaacaagacaaagaagaaatcacatttaatgtaagacatcctaccgttttatcaattagtattatatttcttttgtaaaagccaaatttgtagtttgtttttcccttttcatgttaaaaattgacccaattacacagaaagagatcaaaaatcatgttcaatttctataaggactaagacagatagtcatctattaatgaaagcataaagcattgtttatccgctcgttaaacactgtccaatacttactttttgtatgatgttacaagtggtgaaaaaatgtcataaaattgatagtaaatggttgtggcaaactgatcaaaatgaggagacatttgatatttttaatattccaaagaaaacacatttagtgtttggtatatttgtgcttgatatgttcattaaggacataggacctgtcttacaatctttataccataaactgtgcgaactgttaaaagattggaatactttttatccttggactgaatataacggtgtatctttaagattagataattttcgaaatattaaatacatttttggagacctttgcgttgaagataatcttcaaaacgaagagacattaatagtttctcttctcaggaaattttctaaagaagctggcgaccaagtatttattaaaatagtagatacagatggtgattttttattagctagttgtcatgatatcatacctggaaattatgaatatcctgtgggtaataatcgattatggttacgaaatggtaattttatcattattccagactcaattataccaaataaaggccttgatccacaaatatgtctggatacattattattcacgccttttaaatgtattaacgttgatgatatttcaaaaaaattggataaactgtatccagtaaatgattttcctacaaaggaactctctgaattgggatttttatcgttgcaattacccgaaaataaaactgcagagatattaaaatcaaatcctcgaataatcaactatttgattaagaatctttttactatgagtgcaaatgaaaatgaaaatatccatgttaactatgtggaaaatttggaatataatcagaatgttactaaattccttatttctaaaaaccatttcaatcttcttcttctttacctacaggtcaataatgcagaagtggaacaatttgatattgcaaaagtatgtgctctatatttgttaaagtgtttacgtcatcttgttgattctggagatattgaggtggataatttggggaacaaatcatcagcatcaatgactgaaccaaagtggaatcaagcacttttttacggaacctataagttccctgactttgattacaaacaaaaatatgaagttgaagcaggagtagaaccgaacgagaaactaatggaattatttacacaattctttaatgaaaaggaaaatggcaatagcttccacagaaactttgacaaaaatgatgaatttgatttagaaattgcttcagatggtacaactgatgatgaaaacgagaaagcagttgagtacctttctgaagaaaattcaggtatcaatgaagatgacttttttgaattctttttaaaagaagctttaaatatgaaagatagtgatcttgaacagtttataaaagaggatacgcccgaccttgatattatggatgcacaaggctatggagacgatagtaatgagactggaacaggatctgaaactgagtattttcatagggaaatagaagatattttacagcatttacactctgaagaaaatactatgaaagcatttgaaaatatgtttaattcgttaactatcgatggagttgctagtgggccatttgaatatatgttaagacatttagcaaacagttttgataagaattgataatgcacatttcataccaattaaatttatctttgcgggttcattattgtattacaatatttcaaataatatatatggacaaaaaattatatatttattgttaagtaaaacagtagtatccttgtatgcaggtttaaaaaagtaactttatatgaatcgagcttaatctcttgatacatcaaagtcctcctctgaaaaattatcttctaaatcggcagcatgaacagaatcattatcttcatgctcgttaccactgactcctttgccaccttgacaatggacaaaatactttgagtctgttatagaaccatcagaccattcagtatctgatggtaagatatttgcagacacatgatttggaaatttagagctttttgccaagttgaagccggggaaagcattatctgaccctggatacgacccactagcaattgtatttataattgctggttttttagaacctatatgtcttgcagaaatagtatcctcctctaaaccctcattatttgactcgtcctcattatttttatcactacaagtttcagttttgtcctcaaaggtgtcagacattttaggagaaatatcattatggctttctctaaaatatgagaatggtgatactgttggcacggccccaggagttgtttcatcgcctcctgaagacgaaatatattcttcctccttaataacactctcagtatcatgagaattaccttttaaaaaaactgactttcgcgtccttcctcttctttgaaatgcatttcttcttgaggtattatagttcctttgtatagaccatggttgttgggctaacccgaacctaggcaagacagaatcttttgtagaattggcacaatatgtacttctcttatcggcaattattggcatggaagcagtcgtaatatcataaaatgaatcagtcttcgaactccgttcagatgtactagaagtttctgatctgatactaacatttcttccaataaaacgactttgtgtttttcctgtagaatttattttatcagcagaatgtccatttgcactattagataaagaatataaagaaaccccattattagatggattagaataaagcaggcccttagaggaatctgtgacagttcgttgaaaaattgacattgtgccatcagtggaataatcggatgtgtacgtctcattggaaagctgtgatatactagacaacggtctagaaggtaatttagctaaggatgattttttattgctgaaagacggtgacgaggtcaatatatcaaagtctgcatcattataattattgttattgttattatggttattattatcagagccatgtcctgatatatttgaggatactgtagatttaaatctcttaacttcaggttccttaatatatattctatctgaataatgctcattctgttgtttgttgttaatggttaaattggctatgttattacccaaattaccagggactttgttaactttcttatttggtgatatcttgcttttaatagactctacactatttttgacagatgctgaatcacccaaaatatgggtggcaggtgagttagttggtatatgaccattgatggaacgattgttggtgtcgtattttctattcttgaaaaagtctgacattctcttaaatatattttttctcttaagtaaggtatcattttctcttgtagtttttgtaataagagtggatgaaatacttctttcaggggtagtaattaattgtttttctggattcatagtaggttcagataattttctgccagatagctgttgagttattgacattcctgtatctacttttttggtaataatttttccaatagatgccactttagttacttccaatgatgttttaaatatactatcatcatgtgaattaactgtatccccgccggatagtgatgtttctagaactcttttaacagacaaaactgatcggcttctctttggatagctacgtttttcatgtttttttctttggctagtaataaaaaccataatccagataacgaatcacatttctttttaaagacagagtgtttaattgcttgagtgtcatatcctaatctctttaaccttttcaataactttttttctaattttgtattaaaattattagaacccttcctttgtttggatattattttgtcagttttttctagtattaatgccccatatggttgaagaaaatcatgtagtaatatttcttttacactaggtctttgtacaggatctttagataataacttcattagtaaatctttacagttcacactcattagattatcatcaaaaactggatcctcattaataattttccatttagtttttgtctcatcatcttcatcaaatggcataacaccacataccatagtatataaaataactcccaaagcccatatatcaatcttaaatccatcataattttttctttcagttaattcaggtgccatatagacagtagtaccacatattgtttctaaagtagtcttctgaatagattctctagtaaatccaaaatctgtcaattttgcatttccattcttatctaacagtatattctctaatttaagatccctatgtacacaatttaaagaatgtgcataatatactgctcccacaatttgagtaaataatttagtacattcaccattgggtatccttttcaattttaataaatgatcatataattccttgtttgggcaatattccaaaaccatccagactttagtctctgtcacaataatttcatataatttagtaatatgaggatatgtgaattgtctatgataaaagacttctcgcactatattcggatcatttttagaactggttttaatcacaaccttttgatgtgtaggtttatgtaatgctaaatatactttcccaaaactgccttccccaatttgttctaggattttgtaatttccaacctcggttaattctgttgtagaaaattcactgtatagtttattatacgaagaaattatgacagcttttatattgttttgttcagttctagtttgggagctaatagtcatcacacaattcattaaattaataaatcaaaaagttatatatctgtaaaaatatggaaaaagagataataaaataaaccaataaaaagtttgatgatatcaaagtatattttagacttgtcaaggataataattcacaactttcattaatatctatccttcctttcctcttgcattaatggtaaaactaattaattttttgcgactgtattgagtttgaacaactaaaaataaaacttaaagcagatattttactgatattctaaagtaatatacaatatttataaataatatttcttctttatatagaggtgggtgttcttattgatgaatcagatttctattttaacaaagcacatgaaagagcaatttcaaattcttcaataaattattttttttgctaatttttgattgtttctactaacatattcaacattgaagtgatagaaaaatgttcaaaccagcaaaactatgagagagtgagagcagctagaaattctctaggaatttagaatcaagtggactcagtgattggggtatagtcaattattaagaaaacaattttggtattttatcatttaaagaaacaatagtatctacatgacagacgataattcagataatgttgcattacaagatgtagatgattattattcgaggttaagatgggatagtcaattccattatatggccaaattacctacacatttacaagaatcgattgataaaaaattatccacgagttttcagtgggaccaatcatcgttagcaaatactgatagcgtaataatatatcagaaatcaaaaaatcttaagaaatcctttgtagtggatcaaaataagatagacaatccattagaaagatatgagacattaatgtcacaaaaaccgcaatggcatcatccgtggaaactggcaaagataataaatggacatttaggttgggtacgatgtatagctatggaacctattcaaaatgaatggtttgtcacagggagtaacgataccactttaaaagtttgggatttaggtactggacatttgaaattaacacttagtggacatgttatggcggtaagagatgtttgtgtatctaaaagacatccctatatgttttctgcaagtgatgataaattggttaaatgttgggatttagagaaaaattcagctattagagattattatgggcatttatctggggttcatactgttgatatacatccaacagtggatttaattgctactgcaggtagggatagtgtagttaaattatgggatattagatcaaggaaggctgttgtgacgttagttggacataaggcaccagtacaaaaagttaaatgtttacctgtagatccacaagtgattagttgttccaatgatgcaactataaggttatgggatattgtagcaggcaagactatgaaagttatcacacatcataagaaaacagtgagatcgatagctactcatcccacagaattttcaatggtgtctgcatgtactaatgatgtaaggtcatggaaattacccgaaggtgatcttttaactaactttttatcagaatctgtaggaattattaatacattatcagttaatgaagataatgttttgttcgctggtggagataatggagtattatctttctttgattatagatcaggacatttatatcaatctatacatacagttaaaatgacaggttctttagatagtgaaaaaggaattttaaccagttgtttcgatcaaacaggattaaggttgataactggtgaggtagataagagtattaagatatggaaacaagatgaagaggcaacacctgagacacatccaggtataccatggaacccaattttggcatcacaacgattttaacaaatgtaggaggattagggggatataaagaattaattatataagaagcatgtcattagatagattctttaaggatatatatagagactggaaaggaatgtataaaaattttattgcataatgatactgtataaatgtgtataatcaaatcaaccagagaagggtacaggaggataatgtcttagatatttaaccttaaaacagggggatattagtcaaacggtaaaggtttgggctgttgatggtgatgatttttattattattcatttgtgtagcggcaattgcacttggtattttgatcccgcaacaatcaccccagccagtatgcagatggttagaatgtaattttgtttcaatttcattattatcattcaaattaaaatcagattgttgaattgaaggtgttacaccttcggggcatggtaaaaatttgctaaagtaaaaatgttgcatgataggtaacttattcagtacttcggctatatacattttaaccattccttctgctactttactccattgtttaacaccactgatatcatctagcattggggaatgccatcttaatgatgcagtagtcttaacagagttgatgaatgcaatacaaccaaaatatagatatcggtcagcaaacatctccacaatttcatcgttatgtatggatttaggtttaaggtgtttgtgtgttgataattgaaatgcaccaaacagaaacggtaggaaatgataatcgtcaaggccccacacaccatgagatcctgcaggttccaaccagtatttacgctcaagagtcctcattatctttaaatattcaacaaagacctttaatactaaattagtcgagtctgttctctttatgttgaattgtttataataggccagaccatagagaaaacatataaagtttaattcatggcctgatccatagtctattcttcttttatcaccccacgattgtgtaagatatgtagataattgatttacttgtttgtctgttaattgatggaaactttcctttattagttgtgaagaatgagtttcaatatcatgaaaaaagtctctaaattcaattttgccaaaccttgaagtattagcatctgcaatcactgggtatttgtcaataatttggttaattttttgtaataatgacattaaagaatttattgagtcggagataggtagttcataatctgtgttttcatgtcctctgacactctctgccaaagtctctataaagttgattagttgagatctggtctcagatgattcccacagttttatatcatcttccgttaacagacgtttttctggcatgtttaacaatctctaattattttctgttaattacttttaaacagctaattgctttcttttcttttcttagcttctttcactcttttaaataacgaagtcttaactgatactattccacaatgcacaggtttattcttttcatctgatattcaagacaatttcacaaacacttaggttaaatttaaagcagagtgtttaagaatggtggtatatttatctgtaaaggggttgaaacaagttgtgtataactaattgagaaactacgtaaaggatcaaatacataaagattgaatatgtgaaatatttccagaacgcgtaaatatccaaaagtggcaaaaaaaaatttcatttagaccttcttttgatgttttcgaaactcctaacgcgtttggaatcataaaagaatagaagaacaagatgggatgagtggatgttcagatcagtgtgttaatcacactgatagagcatttgaatggttggtaagtcactagtccgtatctttgtttttttggaaaagcgttaagaatattaaattatccattgtttggaagtggcaatattgttctatcaactcatagaataatatattacttaccacattctaaagtaaaagttacagctaaggtcactcaagaattgttgttctttattgttttttcttcttcttctttttagctgatatactggtaatcatatatagataggtagactatgaatgaaacacagccgacccagttagctacacaagctacacagaggtaccttgtagagaaattcacacaagaacatttaaatgaaaacatagtatttagagttatttgtacgacaggacagataccaatacgagattttgaagttgatccattgacggtactgacgcagcgggaacctatcaaaagaaaatggacgtttggcagaaacatagaatgcgagtatcatttaggtaatattactaggttatctaatagacatttcatgattatgttgggggaagacgggaatcttttattgaaagatatttctacaaatgggacttggttgaatggtcaacagatcgaaaaaaatacaaaccaattgttatcgcagggggacgagatatcggttggtgttggtgtcactggagatgttgtatctttagtcatattcattaatgaccgttttaaacaaaagttggagcaattaaaacttcatggtgctgcacaactaactgatggtaacaataaaattagtaaaaacattaacaagaatagtaagaaacaagataaagaggaaatttgtaggaataagaatggtataaatgacaataaactagttaaaaatggtgggagacctcttacttctaatggagatgcatcctcggtattaagacaacttgtgacgtcccaagtatcaatatatgataaatattttattcaagatgaagtggttggacaaggtgcgtttgcagtggtgaaaaaagctgttgaaaggaccactgggaagacatatgcagtgaaaatcataaatcgaaggaaagtgatgggtaatttcgacggtgtagcaagagaattagaagtattgcaaaaattgaatcatccaaggatagttcgattgaaagggttttttgaggatgcagagaattattatatgctaatggattttgtatcaggtggtgatttaatggattttgtagctgcacatggggcagttggtgaagatgcaggtagagagattacaagacagatcttggaagctgtcaaatatatacattcgatgggcattagtcatagagatttaaagcccgataatattttaattgaacaagacgatcctgtattggttaaactaacagatttcgggttagctaaagttcaaggaaatggaacttttatgaaaacattttgtgggactttagcatacgtcgcacctgaggtaatcgatgggagatatacagatagtaagaaaaatcaggattcaaataaaaggaacaacaatattaataacgatgatggtgataatgatgatgatgatgatagtggcactggtgaacccagagaacataatgaatattcatctctagtggacatgtggtcgatgggatgtttggtgtatgtcatattgacaggacatttaccattcagtggtagtactccacagcagttatacaaacagattgggcgtggatcatatcatgagggaccgttaaaagattgtcgtatatcagatgtggcaagagatttcattgattgtctattacaagtgaatccaggcaacagactgactgcagagaaggcattagaacataattggatcaagatgggacagattgatagttatagttatgataatgaatatgattctccggggtcttctatgagtgatgtgtctaatagagttgagggtagaagttctgtgaagtcttctcaagtgtcattaatggagtcgcttgcccaacagtctattttacaaaattatgatgagaaggattatgaattaatgaaaaagaaaaaagaattaaaattgcaacaaattgaattagataaaatcatggaaaagaaagggtttaaagtacctactcagccaccaataaggtttacacagcaacagcaacagcaccaagttcaatcgcagtcgcagtcacaatcacagataaatagtggtaaagaggtgaaacagagaaggatagatgaacaacagttgagaatacaatctcaaagaagaacagagaatgcaggtaagtttttaacactacagccactattgaaaagtaatgaaaagaggaaactagtaataaagcaaggtattaacatattttttattggaagatcagaagattgtacattccaaataccagattctagattatctagagtgcattgttttatcttaaagaaaaggcacccgatagggaaaagtatatatgaatcgccagcacaagggttggatgatttgtggttttgtcattcgggaagtaatgtgagttatataaatgatcagaagctagcagctggagaaaaggttttgttgcacgatggagatgaaatcaagataatatatgatccagcagaagattatatgattgggtataaagtagaaatcaatgattggacaggtctatttaatgatggtgcatcaggtggattacaggatagaatgatagttcaacaaacaaaagatgaattggaattagttaagaaagttcatgggatgaggagaagaggaggatgtaagacagcagcagcaacgtcgtcgtcgtcatcatcatcgcatacttcaagaaagacaactaagaaatatctacaaaccaataagaatcaagattcattattgacaggttatacgggtaatacagatatgctttcatcatattctagctcatcagtaacaccatcaatagtacaaaatagaaatgaggatgaagataacaatgtggaaaaggatggaggacctagatcacaggaaagagattctgacatgcgtaaagtaaaacgtgctaaattagacaatacaacaataatgtcatcagctccatttataggggaagaaatgttttagaatgggaaattcattcatcaaatattcatttacttttgttgttgtttttttgaattttcaatggacaaataaacagatatatagatatatatggcactaatagtggtttggaatggattggaaaagtgaggcagtaaatcagtcatataaacacatatacaattttatatagacccatactgctctataatgactttccttcctgtgtattttgatttacgctctattttccatttatttttttttttaattttatttttttgagtgggggagaataggggacagataaaaaaaggttgggtgtgtgggtgtgtatggccggagtgtgtctattgtcacagaaaacgtcttgaacaatagagatgataaaagggagagactgttttttttgttctcctgctctcttcacgattgtttttttgtattgtcttggtgtggttgcaagaaaaagaaaagagaaagatgaaaaaaaaaacaacttaaccgcacacaaccgaaacaacacaaagtgagaaacccttgttctgttggacgggacaaacttgtatatataggcgtagtttattttatttcaaattttttttctgttctttccttttgatttcgcatttctttgtttggtttgtacatttgagcattagagatgtcatagataaaggagataatatacgtatatatacctgtcaaatttatttaataaatttgtttgtttaagaagaaaaagaaaaaattaggaagaagaatgaaattgccataccttctatcactggctatagtgatacttggagatccagtatctcaagttgatgccaaagtccattccgctgttttaaaaaaacaaccaattgaagaaaatgcacaaaatatccccatgtatagacagattcaacaactaggagaaaaatatttgaatacttttgagaagttttacccggatattagattccccaaggaaaaacgttccttcatccataacgacatcaacccaatcatagaaaattccttttctgcagagtcagatcatgatatcccactttttaattatatgaatgcacaatattatacagaaatcactattggtactccaccacagccttttaaagtcattctggataccggctcctcaaatctttgggttccaaatgtagagtgtggttctttggcctgtttcctgcattctaagtatgatcacagttcttcctccacttataaggaaaatggtactaagttttctattcaatatggatccggttctttagacgggtatatatctcaagacaccgtacaattaggcgatctaaccataccaaaacaggattttgctgaagctacaagtgagcctggtttggcctttgccttcggtaaatttgatggtatccttggtttagcttatgacaccatatctgttaataaagttgttcctccattttataatgccatccaagaaggtttactagatgaacctaagtttgcattttatttgaatgataaagatgactctaaacatgagactggtgtagccacttttggtgggatcgatgaaaccaaatttgaaggtgaaatcacttggttacctgttcgtcgtaaagcttattgggaagttaaattcgagggtatcgctctaggtgatgaatatgctgaattggaatcgcatggtgctgctatcgacacaggtacttctttgatcactttaccttctggtttggcagaaatcatcaattctgagatcggtgcaaagaaaggttggtctggccagtacaccttaaattgtgacactagatccaatttaccagatctcacttttaatttcaatggtcataatttcaccatcagtccattcgattacactttagaagtctctggttcttgtatctctgctatcacaccaatggatttccctgaacctataggtccattggctattattggtgatgctttcttacgtaagtattattctatttatgatttgggtaacgatgcagttggtttagctaaatctatttgatcatggtactttctttttatgaactccttttttttagttctactcattctatcttctttgttattttctctttccttctctcttccttctgccttttaaattcatttctaatgacttattgttcttccatgtttttttggcgttatgtctttcttgttgatttatttttatcaaaaaaaaaaagaaaagaaaagaaaagaaaagaaaagaaataaatgatcagtttaaaagggtacttatattcatatgtactatatatatatagttgcataagaatttttcatttgtatcttgatatttgattattgaatttttatttatttttcttgttttgttgttttcttctgtgtgtggactattttctttttttgattttattttttacatagttttggtagattcatcacaaaactttaaatcaattaaaaatgaatcatcaaaaaattaaatattgacatattacatgacaaaacaatagaatgaacactccactctgagcgtttgctataagaaaaataagcaatcttcttaaataactcaatagttaccctgtaacaccactttagtactttttacccaatccattcccaggatttacatatacctacatatatatatatatattagctatcatttttgaaaatactattattaaataccatctataactgacctagcaggttgaaaaagcctatacttatcaaacaaataaatacagtaccaaattatggttttcatcaatacatcacgatctttacttctctatgtacttttcctatgtttctctattctttacttgtattggttaaatatttttaaaaccctctaataaataaaccaaaatctattagaattattattacccgcatttttacccaaaatgatctttttttttccattttatgaatttttttttaattttgcacacaatttgataaaaaaaaaatacagttatataaataggcctgtcagaatcaaaaccaaaacttataatgatgcgtttagaaacttttgtatcctttttgcggtgcccatattttgatatcttggttccttccttcctcttttttacttctattttgcaaaagaaccgatacatatttataccgccccctattcactgtgccatctttactttttttgttaatttgttagatgatcagaggggaaaaggaggccagagcagatgtcatcgtagtatgattagttgtaagcgttcctcatactgtccagggatttgtaacgttaatcttaattgattgatgttagtggctctggtcggtaactgcgcaagcaatacattcatcctcttactctctcactctcttttaaattcttattttattttacttttgtctttgttatgtaattcaaacgaaggcatcttgcatatctgtttatataaatcaatgactattaactattatcattactagtagcattttgcttacgatgcacctaatgtctcattcataggtttgatcttcaaaaatatcatgtatgtatatatatacacttaccttatattctttacttatttaatttcgaatggaatttatatagcccatagtacccttggtataaagagtctgtatttgtcaaatacccattcaagttaggttgtttattgataacctccgagtgaatatctttccatcctctaatttgtctcaattgtttcaattcgtctacagtaaattgaaccatgggcctagtcccgtattttaatggaccaatattaatccaatgtaattcttttccacaatgttttgataacgattcaatcgtctccaaatattcaagaacattctctgcggtgtcaaggaaatatactgatattacaataatattgttgataagggtatttgttctatccggcatataacttctaaaatctccccataaaggtttcaaattcttattttccgtagtcacatcctttaaaggaattctaatggactttgtttggctcttccaatcaatctgattagaataatattgactgaaaggagagagttcaacatcttctttgcagttcagtgcaaattgattacagatatacattaaatttgaccattcaatggattcgacttgtagcttgggaaattttttcgacaaacgatatgggatatacccaaccgcgctaccagggataaccaacaaattacgttctgaatcaacattaggaattgataacaattgcgactcaatatattccgttatgggccgtacttcattttgaaaatctggactccaatctctacataaatgtgataaagattcgctgattctcattaatggaatgtctcgatttaatgtagctttccatttttttcttttaatgtaataatttcaccatttgagttcatatcatatcctagacttcgaaccaattcaatgataagtctcatatattctgatgattcattattcttattatctttataaagttgatgaagggttgtctctatgattttattaacaacattcgaatcacggttaatactagattctacttcttggattttcctaatataaccgatatcaatcagttgtattctttgcttttcatccaattctttaaaccgtgtcagctttgtattattatgtcttatgcatgcatccctataacctttcagattaaacaatgtctctctcagttcattgaatgaaattgcactatcacggtttataaaatttgaaataactttcttttctgtcatcttgaaaccaggactttccagtataatcccattatctattcgaaaccaatggtggccagcatttcttaataatataccattttcaataaaattttggatccatcttttataccatctagatctttgaattatagaaaccatacacaatgctattgttaaaataatggtgatcctatcaactattgcattcattgaaatccaccaaaactgatagctacagtgtcaacccgactttaatcagtttaactatccaaatagtagactactcaatttgttcttttccaaacttttttttataattaaaagtttcaacgttatatccctatacagagataaacaaggtattcagaacctcttcaaaattctcttgggtattcgaaaataattacttataccacaaatatttcttgacaatgcaggaacactgaattataatttattttctattaattacatcggatctaaagacttgcttaaaccagaaaaaaatttattgtatgcatcacattaatgcaaacatatagactgaaaggtgattactccaagtatagaaatatgaataaggataacatctataatatacttgctaactttcttaaatatttgtatgtctctcactaaaaatatctgtatgctcctcagatagacttagttgctactttttagtgtcgcaaaattctagttctaataatctttgttcgaagatagttgacagtacaagtcgtatatatatacatttatatacttacggattactgtagaggtaaacaatgattaaagatctgttaactaatatattaactgttagacaaattaaatccaaagagaatgatctaacttttggaaacaacgttgaaagaattactcttacagaactaatcgataacaatgttcctgaatttagatccggtgctacagatcaattatcttctatattatttaatggacatttacagacatgttacactggaatcaagtctttcgaccacattgatgaagtttactatagaagatacattttatcatatccacatggaggagaaggtgcactagattttgcatttaatgacccaataaattcacccttaaacacagaagttccatatcctaatcagaaaccattcgaaccaccacttttaggatattactcctatctatctcccaatgatccaaatctatcttcagatgattcaagacctatgctacttatgtgtcatggtttaactggtggatctcatgaaagctatttaagatcaattattaaatgtttcctagattcaaataatgaaagaaatagtggagacaaagactttgtagtttgtgtattaaattctagaggttgttgccagtctaatatcaccacatcccagttatataacggcggatggactaatgatttaaggtactgtgtccagtttttacataaacaattccctaataggccactatatctaatgggattctctcttggtgcatcaatcgtgactaattatattggtgaagaaaattccgattcaataatcaaatgtgctatggttatgggtacaccatgggacctattagaatcagctaagtttatcaattatactactataggttctaaaatatacagtcccattttaacccagaatctttgtacattggttttaaaccatgaaaaagtattaaagagagatccaatctggaaagagaagattgacaatcaacttaaaaatttgtcttttgtaaaacaattcgatgatgttttcactgggccaatgtttcaatataaagatgctacggattattatatagatgcatctcctaaaaatagaattctcatgataagaacaccatttatctcaattaatgcattagacgatcctattgtgggtggagcatacattcctgaagatttaattgaatcaaacccatttactatggtgttagaaactaatattgggggccatttaggatggttcaaagatgtttatggtcaaaggtggtatccaaaacctatcaccaaattctttaggtcatttcatgaaagaataacaatgaaagatttaaaacctgtaaataatataccggaatataaaggccccaaagttaaaaccactttttaagtaattcagctaaccaatctacatatgcgcatatatatagatgcgcattaacacacagagacgaataaagcaaatattctgtcattctgttcttttttcacttccataaatcccatacattcatttctcatctagacatctgaacaagaataacaaatggtactgaagagaaaataaaattacattaatcattttaaatgaaactgcgtatttctagtttacatgtagttcttaatctattcaaaccattaattatatccattagtgaacactatcactttaattacaaatatacttagtattactatctatctattttcttttctaattgtaaataatatataattttctatacaaattgctttcacctttaaatagtagtgccaaaatgcagatctaagagcatatatatcaatttttgaagattaaaactaagaacgcaaaaaaaaaaacaatgatatacatacatacatacatacataaatatacgcaaacagaaatatttccataaatagcaaacccatagcttttattctctccactccaggatgcatgaaatcattacaatttcattgtctcatagagccaaccatcttaccacccaattcttcaattgtcaagaggagacattactggatacaaatccaaatgattcaattgatccatccattttcctttatcctactatagataaaatatctaaaactgtatcttattccccaagagctttattatgggaggcaaaaaatgggtttggttccttgggaaagtaccagtatgtcccagaatcgttagattatcattttaataacaataattcagaaatacctccatctaccactgcaaataacactaatataatatctactcacccaaaaatagaaaaatctgcataccaaaatgcattagatatagatccatataatttaccaaaattgactaaagaaaacactaaatattggtctgattactcaaaattaatacttgaaccaaaaagtttcaatactttgcaaaattggtatcataaagttgacacaccaaatgttcctgactatcaaaatttaaatcaatatggatttaccacttatgaacaaggtgttcaagaattcaatatttgtaaggacgacttcttggattataatttaagactaatgctggaacaagcagacactttacagggtataaatttcattacagatttagattctgggtggggtggtttagcaacacaattagtacaggatgtgagagatgaactacctaaatcaactttttttacatacgcttttaatgaatcagacatgtttagtggtgcaaaaattaatcacactcttatgaggaataaaattaaaagtacgttggcattaaaacaggagtctgatttatttttccctatatttgccaatagtcaaaagttatcaagctgggaaattggtggtcagacttgtagattacttgatacgatcaattcagtattatcacaaagaaataaggaacaaagaaaatctatggaatatataacatcatgtttagttaatgatgatcaattacggaatgttataactactttatatgatacaaactatgattacgattattctttctattctcaagttaacaaagaggcaaaatctcgtgtgtcatcaaaggaatatcatatattttcaaattgtttaataatcaggggtgaaagtgatgaactatcatctcaaaataaggagggtgaacaaaataaatttaaagaatttagagaattacgtacaactacatttaaaccatctgatactattcctgaagaatttgttgaaaagaagctgacatcaattaatatgtctactaatgaaaaatctaggtatgtatttaaaaattggaacttctatatttctaaaatatttaaactagatgaagacagagaagaattaaaaaatgaagcatctaatttggtatctgcttatgaatttgggtattacgacgatgaagattctggtgatgattattgataggatataaaaaagaccatatatttaaatagcatacatttaatgtgatatttataggttatactgatttttctattcaatgtattattatttattaaatatgtatatagaaagtacacgttaaaatattatttatctatataataagaacaactatcttaccttctatcgttttaaagacataaattaaggtcaacaatcgatgctatctaaatatttatacaattagcttgatgcaaaaagtttacctctaccatcaaccttaggaacctcttcttcagcatcttcaaaattttcaacactatcgatcttagaaaatacttcagctttatgcatgcctgtaaaagaggttcttttatccgttttcaaagaattttgtaacatgattgaatgagaccgacctatctttacaccatctaaccctgttatttcctcttcatcaggatctggaattttttcatcttggtctgaattttcttgcaactcttttaataagaatgtaatattagtaactcttgatttaacagattgagatccacgaagagattttaaatttttatgacttgaagaagatggagtctttttatctcctgtatacctaatgtaactttttaaatcacttatttttggagcatttgtcttcgttgttttccatgatctaagttcatcagaaacatatctataaacattttctctatttgctatcgttgattctctggatactcgtgcctttatagcattgatattatcttgtaatgctatttgcgaatcagatcctgaattatttattatgactatgctatttgatggctcaattaggttatgttgagaatctgatgttagatctactgtagataagttgtttttttgtaacaataatatttctgatcctctggaagaatacttattcgaacctgcatcagagtaatagttcaataaatctgcccttgaaaataatagtgagtgctcctttttatattctgtttgaactctatagtcatctaattttaaaaaatttgccgattctaaatgatagcaataataaatattgtcaggttctttcgttgtttctaagaaataattaagcccacttaacaaagcaatatgttcatattttgcaaaaattctttgcataaaaattttctgcatactctcgtctgttaattttgaaactgtttggaataattgcgacataattggattacttggtgattgattgttgactaaattaaacaatgttaaaaccatagatgattctaaaaatgttgataattcaacaaataactccaaagtaatacatggttcatttttatattttattacttcaacaacatctttaactaaaatatcttgttttaacatctcgttggtagttttgaatcctttaagtctaattaaaaattcatatagtatatcaaaggtttgacctttgtaataatttttaaaacttagatctctgatagtgaaacagcattgattggtgatttcatggttatcataattatctaattgaaattgcaaaatttttttcataatatctaaaacacttaatcctacaattgacacatcagatgttaaaagacatgatattaattttagccctgtcacaggatcatactctgaatctttagcatttttatcatatgtcaatcttcttattccaagtaaaacaacaatatatctcagttgcacaggaattttattacaaatatatgttaacaattccttatttggtgttgattgtaaatgtgataataaagctcttactgaaacatttagtttatctgtctctgtagtattaaacaaagattgtaaaattttaactgttaaattgtcctcttttggcaagctaatatcagtaccattagttctagtttgcactttgcttaatcttctattcaaattaagtatttctgttggtgtggctaaagaaaccattttatattggggatattcttcttggaatttatttaatgtaaattctactgctttacgaatataatgattcaattgtgggttattggctatactacttgtatttgaaatatcttcacataatcttaacaacaattcgtcgttatgtatcctactggtaacaactttaaagaaaagatcgatgaacttggaatagtttttaataaaatctgaatcactactatatagtgtatcatccactgaaatgcaaatactactaaatgtaacttctaataaatccacaatagagtaatcattattgaaattttcattgtttaatacagttagcataattgaaaagaaatccttaataaaaacattcaaattttctttacaattcttaacaattttattcatcaattctagagtgactgaaacattaccgacgcgacgtctatttaaatctgatcctgttctctttacaagaaacgaactgactttttctaacttactacgtcttgaattaacatagtatagaagatatgaagtctctgatgatttaggtttcttatctgtagtactcccactcggataacattgattaaccaacctttgatgtttaggtaaaaaaacaaacctcatatgcatgacaagtggctcaatgttagaataataaaaacaaaaaaactaaattcttctataaatatatctattcttccttccttccgtctttctctttctttttttttttcttttttgtttattatatcttttaatattccatatagaataattttttgtttgatcttacgctaagagtaacaaactatagccatatatatttatctagatatcttaaatgaaagatagcaacctgattttgcataactagatatgtatgtaaacagaaataacaaaaactgatagaaaagtattatttgttattaattttgagatatctttcgaatcttaaaaatgttttgattcttttaaaatttcaaatttatttagtttatttttcttatttaaaaaaattgttaatatttcaaaaatattataaaagtatcagtgagtaagaatagttattgtttgaagagtaatattaccttaaccattcaatgcaagcggatgggataataaatacaaggtatcgtaccaaaataaacaagcatctaccgttagtaggtcactaatattaaaatggtggcacccgtttatgtaaaaggtggtgtatggtcaaatctagaagatcaaattttgaaggctgcagtatctaaatatggcactcatcaatggagcaagattgcatctcttttacataaaaaatcgtccagacaatgtgagattagatggaatgagtatttgaaaccaagtttaaattttaatcagtttagtaaagatgaagatttgaaattattgagtttggctagaaggttgccaaaccaatggaggacaatatctacgctaatgaatcgtccggctcaaacttgtattgaaagatactataaattgatgcttaataatggtggatcagcaaataacaaacaacttaaacaagagactactcatctaccatcaacaacattgaaaattggtgagatcaatccccaagcagagacacaagttgccatacccgataaagatgtattagatgatgaggaaagagaaatgctagcagaagcacaagccagactacttgccacacaaggtaaaaaagctcaacggaaggtccgtgagaggatgttagaagaatcaaaaagaattgcttttttgcaaagaagacgtgaattaaagcaatccggtatctctactaaaatgaaacatggaaagaaaaaatattcatctgaaattaattataatttagaaataccttatgaacaagaaccattacctggtatatatgatacttcaatggaaatagaacgatctataaaagagttggtaaaatttgaaaatatgatagaaagaaaggggctaagagaaaaagaaactaaagaggctaacgaagaaataaccaaaaagaaaagaaaaaaagataacaaggagcgaaatgaaagtaaaactgagcaaagtatttctacaatacatccaaaaataatgacaagagaaaaattaattttgtccaaacctgaggctagggatattgctcctaatagtacattgatatcagataaacaaaatgaagtcataaataataaacaaattggatctatattagaccacaagcaagacaatgataatattcctgatgagactcgtgatttttcaatattaaaagaagacgaaccgttaaatgttaccatacatcatgatacagaatttgataaatttatgagaaaaagacaattaatacagttgtttacaatgttaccaccaccaaaaaatgattatgaactagtaataagtgatgaagaaaatgataataacatagcggaagaagacagagggaaagaaagcaatgaagaggaagttcagaaagaaggtacagatgaacatgttaacaaaaatagatctgatactaaagaagagtactcaaatgataaaattgtagttcctttaactagtatgattcacgagaacttaccagttgcgtcattcaaaattgacccaaaggatgattatgacattatgtataataaaatattattaaagtccatgaaacaagaagattatgagataactccagaagaatatttaaattacatgaatgttgaagaagagataaaaaaactgatagcaaaagatggaagtaagaaattaagttcatatttaaaagagattaatgatactctgaatgatagcaattttacagatgttgttaaattgcaaaaagatatagtagacaaaagagaacagataaaaatgttacagtctaatttatcatatattgaacctcttatcaagcaaaacaattacatttcgaaagagttatgcactaataaattaccatatttacaaagacttcaaaaagagtattttgtcaaatacagaatatatcgtaatcgctctagaagtataaaccaagaaatgaacaaaaagaagaaaaaataaaatagaacatttgaagcaatcagatattatcctcaataaataaaaaaaaaagacttagaattaaagtaacttaccagttaacatgatacctatcaatgtgagtttattggattagattatgatatatagttttattcttattttataactcataaaatgcttagtcatccttgttagtaacaaaggtatacattctgcatatcgcgttgttttgacaaaacaaaaataataaacagaacgacgcgaattgttgaaaaatgtaaacaaacatatttaagaaaaaattttttcttgtccttttatttgtttaaacatctatttggttaatctcataattatattaatataacatatatcgttacagttaaataattatttgttttaattattagtagcatatttgatactgcttccaacactgttcattgcagactatataatgttctatggaacacagttataaattattgcttttggtacatttttacatagctccagagtataaaaatatagggaaaaggtaaagaacaaatatagcaacaaatatataataaaatatagttttacaaagtattttattttatcttcatcttatttaccttttataatttgaagcatgtttgggaaaaaagttttgttaagtttattatcaatttcacctatctttgtggaggccatgttgcctatccatgtcaaaagttttagattcatccagcctgcttctcctgataataatccagaaaagaatgaagttttttttgtaaagggtatagattatcaaccaggtggttcctcaggttatgattcttctagtgatcaagatgttttatctgatccagatatttgtgctagagatgtatttgcatttcaacaactaggtattaataccattagaatttactcagtcaaccctgatttgaatcatgataaatgtatgacaatcttaaatgacgccggcatctatgttatcttgggtgtaaattctggtaactatggtgagaatctaaaccgtgctgatccaaagggttcttataatgctgaatatttgacaagagtatttaagatgattgaagcctttaaggattatccaaacttaatagggtttttctcaggtaatgaggttattaataatgaaagtaactatgctgagactgtaccaccatatattcgtgctgttcaaagagatatgaaacaatatattgctaaacattctaatagatctatcccagtaggttactctgctgcagacaatactgatttaagattggctacattcaaatatttacagtgcaattcctttgatggtaagacaataaacaaagcattagatgaatccagatcggatttctatggtttaaattcataccaatggtgttctggtacttctaattggcaatcatctggctttaatgtactaaactctactttcagtgatgcagtcatccctgtaattttctctgaatatggttgtaacaagaatattccacgtacatttgatgaagttactgatgctatttatactaacaaaggtttagaaaaggttttttcaggtgggttagtatatgaatatgctgaggaagctaacaattatggactggttaagattgatgacgataatgggtctataacatataagcaagattttgttaatttaaaagaccgtttagcaaaagtcaatacatccattatctatgaagatactcttgcaaacaatacaatttacaaatgtgactccagtgaaattttaaaaatctatcctaacttcggtgtatcaaatttcactatcccagttcaatctaaagaaattgctgatttaattaacaatggtgttaaaaatgctactgtaggaaagatcttatccagttcaaactatacagttccaaccactttgaaatataccgttaaaaatcaagatggggacacgattaatgctgctattgtctacaaatctgccaataccataaacgaattaaatgcagatattacaactacattgacttttagttcttcacaaagcaaaacatcaacatctgtatcttctacatcttctagctctataaagacttcctcgactaagtcttcctcttctaagagcaaaggtgaagctgtttctatgaatctacctacatcatttattcaatcaggtatttttaccatgattctttcattattgttgtgaatacattcaagagttcattatgtttgtttacttgtttaaatttttcttttaattatatgctctactataatgttcacttataaaaaagttttattaatttcttcatattatatttgctgttcactttaataagttgtattatttatactatgctttattataattatatatcttgagatgtctatatatttactaatgtaatttaatatatatccgcacctgtactcaaagtaaaaagataaaagaatgattgaatggattctgaaggttttcaagtaacgacaaaatataactcttgtttatgtaatctggtctcatttgaatatacacaattatatatcattgttttatctaatgcttcctattatctacagcttcctcagcccaaccaggtatattcattccggaatcatataactttctatctggtactgatatgttttccattccaacagtatcttttagccatggatggtttacaagtccaccggcatctgcccttttacggggatccaattctaacattggcaataagaaatccgaaatttcacttgcatcttcctcactgaatttatacttttcaataagcacatcctttaatggccaaaatttcaattttgatatgtttctcaattgaccacgtgagttgaaataattcttagtgtatctaccattttttaatagatatggtggtaattcacctagtagttctataatttgtgcgatatggtcatcttctttagtataagaatgcccttcattgggctcaaataagaaatcacccgtaataagttcaaagatcaggcatccagtagaccaaatatctgcaccgcaaccccaggaggcacctaatagaacttcaggagctctatattctcttgtttgtattgaatttgtgtaatgctcgttataccaacatgaatttcccatatcagcgattttgatctgaataatattttgaggtgttcttagatcattactcatggtctcacttaagtgatcacttgtgttcgacgctattgcatcgtttgttaattcgaatgacgataacgaatgggtcagttgtttttcgcttaaaaagaaattattgtcagtattattggtactgttactattattattgttgttgttattgttattgttgtttgagagagtatttgatatattttgtgactgtagcatacctgggttaaatgatgacagggataagtggatagttggtgaaaatgaattagaagacagtattgaatccattgtctcattattcttgaaacttgaagaaaaatgcggtaataaagaatcattacccatgttattgctggcaataccagtagaattgttgttgttactaagtaattgatttttcatttcaaaaaaattggatgaacttagtggtgatggtaacggttgagaaccggtgatgattgtgtttcttcgaggtcttctaaaggatgaggaggaagaagatgggattctttgcacattagatacagaactggattgaaaataggaattttgattgtaagatttatatttggtgttgttgctgtaattgatatctttagaagattccttggaagaattggatacgggcatattttttttcagcttgatattatgtagacttgtacttgaatcgtaggaatgtttatgagttagactattttcagtctctgatcttttcattaacagttttctttgtaattttttctcttctcgtttctgtttatctagcatctcaaccatttgtataatcagttcaacgtcgccgatctccatcaatatattctctggtttaatatcggtgtggatgataccacatttcctatgcatataatccaaccccaatagtagttgttttgaaatctgtttgacgtagaccaagggaattccacggtgttcatattttctgatcaaagctaacagattttcgcccaggacctcgaagaccataaccacgtgcttcccattaggacctttatggaagaaactatccaagagatttaaaatgtgttttgagccctctgattgatccacagattcctgtctcaacttctccagtaatttgatttcgtccaatgctgcctcagtgtagattttgtcacttctgactattttgatggcgacatgggaatgtgttttcatgtcctttgccagccatactgtggaaaaatggccccatcccagtttccgcatcaatatgtatctcgagtccttataagtttctcccttaaaggctggatggtagccaccaggtttatagtctgtcagagattcctcatttttttcatcgcaggaagaataatcggagtcaagatcatcgtaatcataggaagaatttagtgtgtttgcagctgtgtcagtgactatgtgatttgtggtatgaacagacaaagagggagtggaatgcagattcatagtggagttagagttactttgaagagcaatagacaatttagatttgttatttatcaatctcttaattggaatcaattctcttgtagagaaagatgaacctgttgaagttgactgattagatatattatttgagttaacaggttgtttattctcattaaccttggagatattattattattattattattattattattattattattattattatttgtattattgtttgtgttgttatgtttaccaccaataagtccaccaaaataatggattgaagaacccattttaaacaatccaaaaatataatttaatcgagttgtaaatgaaatattatcagtaagtaataatatggatagatatacatatatacatatacatatacatatatatatatatatatatatatatatatatgaagtgggatattagaggtatattttatttgtatacgtgtatgtagtatgtgtattcgaatatgaataacttgtaaaatatggtcagaggtattgtagcacgaggatgaggataaagaaaaaagatatgtatgtagagtgtacacccaatctactataaaccgttctattcacaactggcttcctacccccacataataataagttattatcactccatcaatcaagtattgcccatctcaataacatgcatccatggtctccaacaaaggattttccactcatcacgtcacaactgccgtctcgaatttcaaaaacatttgctgggagggaaaaaagaaaaaagaaaagaaaaaaaaaagaaacaaaattatcaaagcagggtgtgtgggtgggatgcacatgcagtttaccctcccgctcttttttttttttcttttttatctttttatttcttttaaccgccggcgtgtgacaaaaccaagatggtgtcgttttcgttcggctggtgcgtcttgagcggctgcgtttcgtcttggctggtaatttgtattcccggcaggttcagatggcctgttctcagtggaatcaacgacacgttcaccactgtcactgctactgccttcgcttctgttgtggcagatgttgttgacgacgttgatgtggattctgcttgtagggtggagcctcttctgatggcaaaccgtttcttaccatgtagtaaccagtcgttggatgaggctatctcgaatatatagagggcaggttccttctgttcttcttcctgttcttcctgactttcttcccattggtcacttatatccgttatggtgatcttgaatggtatactctcaccaacagcatacgtttctttaggtggtaacatatttgaatcactagacgtatccttctcaaactgaatcaaataaaacggtctcggtgattgcagctccactggcactatcaattccctttgtaccactgtattctcattcttatttttctctctgctattgtattcgagcattttgaaccctgtatcacacaatccttttaaacatccaacgatttttgatcttgtttcatcttccatgcatattcttctcaatagatcattctcaataaaatttaaatttatcgagtcattctctaatattaatataccttccctataatatctttcataattatattgcaacctcggtaaaatatttaattcccaaaatattctccatttatctgtatcgccatctctattcttttctttgtttaacactcgataggttaatatattgtctaattcctccttcaatgtactatatctaacatgtaaataaaatatatcccttggatcatatttattcggtcctttagtcattattctataactattcacacaactatcattgttggatgatgtcaataatatcggctcttcaactcttaaacgccctaaaatctcatatttatccaataacggatcctcttctgttactttccctccagagacttgttccactgtactaacaccattcaactcactgtcatacaacatcactggttcctctctgatagatgaattcaataaaaacttaaaataaaacctctcgttcttaaagatatcttctacagatacagacaccggcaaatagcattgtaccaaatgatgattgatctcttgataaatctccgtggacttcaaacttttctccgttttatctaccttttcatattggaaaatagttttaatgaaaaaggctgttgtcaaagaatcttgcaaataatatggtacagttatatacccataagaggaatcaacaatcaaatcatcctttgaatcaataagataagtaacatcgcttgtatctgattcatggaaccttatcgggtagataatactctcatcatccttctcaattatcacttttaatatgaacgtgcctaccttgtcaagattgaaaaattcaatgtttaatctattatcacctaattttaagcatctttcttgttcaatttttacacttacattattttgatcaaagatcggctcaatatatataggtttactatcctgtttactatacctgtgcaacaaaaatttattaccaactttgatctttaattgaaatgcctcaaatttaccaaaacttatttttttggtattcaattgaactacatttctattgttccccacttccttacctaattcaacgttttgtctttggaatgttaccgtctctttgttcagtttagagattcttttatgtaaagttaattcaattgaatctattgttacggtttcagggatgctgaaatctgtaagatataatttcatagaatatagattcggttgttccatagttacatacttgccaacatcaaacccaattattccatccattgaataaacattctccattgtatcatcattattatcattatcattattattattattcgaagcagcagcaacagttgctgttgttgttgttccatgttgagaaccgcccaatttaataaatttcttccacaaagtaattctttccctcggatcatcacttagcttcaatagattcaaatatgaatgactcagaattacatctaatgatactttagatccgttgaattccaatgatttaatattattttctccacatttttcaattgaatctacaaacattttcaaaatttgtaatccaatcactttccagttcgattgaatatagtattcataacatgataaaaataatatgatcgcattttcgtaatctccccgttggtaatataccacaccgatttccaaagacaaaatatccacaattctctgtctccttgaatcacattgattgtacaagccaatcaattcttgattgaaacgtatgaagccttcatggaacttgttttcatcatccaatacatcctgatcaataatgtcgaaatttatcttgtttgtgtttgaatattgtttatacaacattttgaagttcgtcattgtcaaaataccttccagccaacaatcacgcttcattaataataaatcagctctacattcaataacatttttatccaccgttgaagaggcatgtgatgaagatggtaattgaaaaaatcttattaacaaagtatctattattgaatatttaaattgtatcaaattggcattatctgggaataaaagttgactgtttctgagaaactgttttgtactgtaatatattcttctaattgggctaaaactgttatccattgagtagcatttcaaatcccatatgagaaaatgtttataacaatcaaatttagttaatgtatttgttttcagtaaatcacttaaaaggaaggatatattaaacgagaacggatattcaagattaccatattctgtcgtattttctatgaaagaatttaattccatcttaattgtatcaagttgtctttgacattcatctttcaatttaaattgcatataaagaatcaatatttgttctcgaagtctcaatttttgatacaattgctggtttttattgctgctagtactgctattactattatcaccattagcactattgatattatcatttgtaagttttgataaactttcatttaaaaacgtcaatcttctttcaaatatgtccaacaaatatttcttaatactatcttgtaaatgtgtccaaaagatttgcttatcttttggtgatttatatacagattttaattccaagacttcactggttggaaaatctttcttaatcttttcgaggatatttattgaagtaaataaattcgattcaatgacttttgaattgctgtaaaacaaaattaatggtttaaatggtaatttagttactgattctacttgatttaactcattgaatgaccattcccttaaaagaggacgtatcttagctctatattcatcaacagattggcatgtaacaataatcaattttaataaaggttgattttggataggattgtcagaatcatttacgttaattttattatacttatcttctgaatatatatcgatgggtaaattttcgactaatctggtcctagttagattgttctgtgatttccaccgaacattagttagtggaaataattttaaaaattcattcttaacattgtcaaaaagagaaaatggatcaaaataactgattcctatattatcatcaaacgaatcaagcttcatctttggttggaaaaaaataaacaaatacgatctctgtaaaattctttctcctgttctataatttatctttctatcttattcaaatacgtttttttttgaattaatgtctctcttcatttaatggtcaattcacctttttactatcctagaattatctaatcaatacattcaacgctacaaaacttatatcttaaaataaactactataatacagtaacaatgttaaaagtggctattgtgtctgttcaaataagccttaagctctttttttctagttttgatttattctgttagtttatttttttttacttttaattccaaaatttttttcacattctttaaaagcaagaagaataaagaagatgttaaaaagaaaacaacacgacataatactcttttatgttacgagaaatagatatttcaagctttctaatttgaagtatacattaggttaatttcatcacataagaaaaagggaaataatatcgaggatattaaacaacttattgattgtcagtcctaccaactagctttttaactgatagcataaatatttcatgacagcaacaaacaacgatattgacaatactgataattcttccagaaatttttcctggagtaataaattgacaacaccaacaagaaaatggaaaccatatcagtctttgttaaagagaaggaatggttatcagattggttcgcaatattatatacaacccttaaatctaaggagtatatcgatagctaaagtgactaagactactaagaattatgattatcaaataagtcaagagcaattaaataaattcaaggatcaaccagccttagatacagttaccagtgaatggataaaagatatgattcaaagaggcaaagatattttgaacaaatcaaggcttaaagaacaagaaataattcataatagatttaaaagatatgaagaacaggaaaaaattgataaaaacacattggatggaaactcatttgaaccactaaaaaattataaaaaaacacatgaaactggcagttatgatgatgataataccaatattgataatatatacacaatagaaattgacgaaaaacaagattatgaaaatttagctattgaaagtcaattggataaagagaacgaaaaagttcaagaggacgatgaacaaaaacaagaagatgaagaaaatatagattttgctgatactgaagtgagtgaagactctgaaccctcaatcattattttgacttcagaagatgaagatgaagatgaagaaaagttggagtcatcacatactgataaagaatacaataatgatatgtttggaggacatgagagtgataaaagcaattcttatggtgaagatgaatgtgaaagtgaaagttatgaagaagaagaggaggagaaggataatgtaattgatgatgaggatgataataaaatagaagataatgatgataattgttatgaaaatatgactgtagattttcaaaaatatatgattcctagaaatcatgaattcaaccaaaacagcaatccgtccttaaatgattttatgtcaaatgagtatagtaataaatctgaggataacaatataaatcagaataatactaaccttcaagctgaacttgctacaaaagatgtagtagatggtgaatacgacgaatctaatggcaaacaaaacatattggaacaatcacaagaagaagatgagatatcattggaggaagatgaattgtcactttctacaaaagaggtaagtaatagagaagatattgaaagtcaagagaaaagctatgatgatgaggaaatgacaaatgatcattataatgaatatttattacctgagcaagatttgggtgatcaggaaagtaatgatgaagagaaaagcaaacatgatggtactcactatactatcattgacgactttagtgcagatgatctacaaggacaggagtcccttgaccaaaactccttagagaattcaaattcaatatataatagacaagctacatctgaagaacacatatatagtgataattctgaaccagaaactttctattcagcatcatcattaaaaaatattgctaagaacgctatatctcaaatatatcctcatttggagaatcaacagtttgctgaaaattttgattcagttcatgagttgcctatagatgttcagtccggatctgataagaatgaagaagatggtcaagaatttttgcattttggtgttggaaattccgagatacaagaacatgaaagtgatctaaatgcatcagaacaatgtcagaatattgttcaacttgggagtgaacataatgaactcaaagaagaaacgtctgatcatcaagaaataccagaaactgaacagaagaaatatgaagaagaaatgaacgatagtgaatcttcctctactaataatatgtcaatttatcattcaatgaataatgaatctgattacaatgtgttgacagaagtaaaagtacctagtaacaatataaatatgaaaaatacagatcagtatgagatagtcatttctaattctgtttatagtaatacttcagcagatacagacaatagagaagtctttccatcaaacgtcacatatgtttctccatttagtgatgatccatttgtaccagcagaaattgatgaagtatcaaaattgaagttacaggaaactttaactcttttgagtaaaactgatagacacaaacataagctggaatctgaatctcgaaacagggataataataatgatatttttccaaaagaagataaagaaaataacaagaatatagataatattaaaaaaaaaaaaataaataaagataatcaaacattagaacaatccattggggaattctcacagtatagtattagtaaccacgaatataaggaaatcattgagaataaaatattaaataatgattcacaactaaataccagagttgaaactataaatacaagacaaaaaaatatcaatattgacaaaaataatgaaacttcacatttgttggatattgaaaaacatctaacaatgcctaataatgaattttttgagcgttcgattgttaataaatcttgctctgaaaaaatcaattctgaagctgctgtgcaacaatatgaacatagtcaagcgggaattaattcagcaactgagatttcagaggctattcaagatggtgttaaaagtagaacattatctaatattgaagaactctttgatatgaaagttaagacaatttccaatcctcaaaataaaaacccagaaatagtcaaaaagaatttagattcatgtatagaattagataaggatgaagtcttacaatcaggaaaagacagtttagccaattctaatcaacgttcaaagatgttattggaaaaaagtgaaattaactgtgttacaaataacaagagtaagaatattattattgcagcatctgaatcaatcacaccaaatacaaatatgactgatctgaagaatatggatatgaatcctgagctagaagaacaaagtaatactgacagaacaattaattttgaatcctgtgaaagtaaaaatgatatttcaatagaaaataaaagttgtaacaccaaagttttgtctaagacaacaaatttgagtcaaccatttgttgtaaacaagatcatatcctcaccaattaaagctattaatgccctatctgttggtgttcaaaagataagcaatgtggctaataaatttgtagaaatcttggatgtaggttattcttcagacgaaaacgaatcaattatagagattcattcgtctccaaatgttggagaaaaagatggagatgaagaaaatcaagaaaaacaagggactcaaaaccaatctgattttaatgctgcacatagcatgatcgatattgaagagagaaataccgagaataacgacataaaaaatatgaataatcatactgaagaacttaataaagatttatcgaatgacaatatgttgatacagaataatagtatggacgaatttgatatggattccacaacttatgatattaaatcatctttagatgtttctgtagaaaaacagaataattctaagttttcttctgaagagcattatgataaaaaggataatgtagaagaaatagaaatcaatgccaatgacaatttacaaggtttactagataatctaaataatgagaaatcacaacaaaatattgccgaggaacaaacacatcaatttgatggcaatattaatggtaatgaaaatggaaaagagattacatctcatggtacagttactccttcaattcattcttcagatttatttgcagctaataaattattcgaattagctaaagagattgatgaaaacaccactgtatttaataaagggcaaattactaagcaacagacagggtttgacgattttaagcctgatactgatagcaaaattcaagctattgaaaaagatgagagatctgaattagaaaattatccaatcaatagcatcccggaatatatcagtagaataggaactgattcatctagtagtattattgcatcaaccacaattactgcagtaccacaagaatcacttgagtttattcataaagacgtagaaagattgcgtgataataagcatacagaaaataaatccattgatgaggcatcttcacaattagatacttcaaatgaattaccatcagatccaccttctgatgataatagtgataatcaaagtcaagacaaagtagcacatgaaggggatgaacacattataactgtcaaggaaaataaaattgtaagtaaaaaggagaaatcaaatgacaccatattgcatatatctatatctgaatctgaagatcaaggaacagagaatgtacccatacaaaatcatcagaatgaaaaaaccttagacaatcaaactgaaatatcggagagtagtatagatacagatgtatctaaagctaatcatgctgaaaattatgaaatagaatcaaaaaatagccatagtgttttatcagatgataatattgtagaaccaacatacaataatgaaaatatatcatttgaaaaggctgtatcatcagtaactgtattagatgagcctacaaaacaagaaaatataaataaaaataagagaaaacaaaaacaaaaatcatccagacaccgtaagaagagaaaagtgcctattacaggttctcacgtaacatctccaggaagatctcacaagaatgaaactaataaaaacaataacaagaataatagcaataacagaaacaatgctaataatcagcaaaaacataaaaagttcaaaaagaatgactttaatcatgatgctagaaagtttgaataatattctatctgtgtatatatatgcatatatatatatatatatttaagtttccaaatgttttaaatttaatctaaaatgtatgttaatatataatattatatatagattgtttccagggggtaacaaattttcttgtaaagagtacctgcatacgtatgtgtaagtaggtgtgtaactgctttattcgtaaatgtttattttaattcttttagcactttcgtttttctttttttcttttattttttccattgagaaacgagttttatcaaatttaaaacattaagaagactagataaaaacaaaaatttatcataatagacaattttatatacaaacagaataagcgcatcttgaatcgtggaaatgtgaaattactttattccaaatcgccttatttcttgtgtctatcaggttttattggagcttacagacccactattgatttttttatggctattgattaaggcattatatttatttatattggcatttctaaccaaccttgaataggtatttttgttttatttcaaaaggtcaaacattatagagttcatttatttgcttttttaaaattctttgttattacttctttttttaattttaatttaattattgttaaaatggtggaattggaaccacgtgcttttagtgcaccaggtaaggcccttctaattggtgggtacttagttttaaatccacaatataaggcatttgttctggcactttctgctagaatgcatgctgttgttaaagcctcttctagatcagatatttcgggcgtttatttaaatgtgaaaagttcccaatttaataacaatcaatggaactataaagtgtctagagataatggttacgttcctttagaaattaatgatttaaccaatccatttgttgaacaagttgtttttaatgctttcaattactttgcaccagaaaatttaaagtttaattacattgaaattgagatcttttctgatcctgcttatcattcgtctgagggcagtaaacgtaaagtaaatcaatttaaatccttcaatttccatgaaaaggatatcgatgaagttaataaaaccggattaggatcctctgcaggattagtcacagtattaacaactgctttatgctatgttttaatgaatgggaatagtttagatatttcaaatcctaatcatttgaaaatgatacataatttagcacaagtggctcattgtcaagcacaaggaaagattggaagtggtttcgatgtggctgctgccacttatggatctattatttatcaaagatttgagccagctatcattgcagacttacctgtgatggatattaaagatattaataagtatcatgtcgctttgaaaactttaatcgataatttggattggaacattacttgtgagcctgtaaaactaccaccacgattaaaagttattatgggtgacgttcatagtggttcaaagactgttaaattagtaagtactgtacagaaatggtatgccgaaaatttaccaagaagtcatgaaatttatgaagagatcaattttaataacactgttgcggttaatactttaattaagttataccatataagtgaagaaaggcctgattattataataagatgattgatggtttaaacaatgataagaacgatgatcctgatatcaaagtgttggcggaatcgatagaaatgattagagagttatttagaactattacacaagagtcaggtgctgctattgaaccattagaacagacagaattattgaacgcatgtttaggtctcagaggtgtgattggtggtgtagttcctggtgctggtgggcatgatgctatctctttagttatgactgaagaaacaaatattaagaaaattactgctggtaatccatcttttaagaatgtcacttggatggatgttacacaagaacaggttgggttaaaggaagagaatgcagaatattataaagaccttgaatcagatgaagacagatagcctttaaagtaaaaagtatgtaaccatatataacactgatatatatatatatttcactattgatgttctattattcttttagatgcttcttggctcacatacttattaataatattgtattaaatgtctgctttaaggagtatcattgtagagagcgtgtacatgtatctttatctatttaaattacaatgattgctttattctggtttgtcttactatgcgtatttcttaggtcttctgaatcaacaaattttttttactgttaaaaaaaaattcaggaaaggatatgtgaaaatagtttcattattaaaacttacagatggttgaatgtgggcagaaataagatgtacttagaataggagcatatttaaaaattagccctgggttcatatcatctgatcactgatcttacacatatcttcctatttagtgacagcattgtaaaccaaaagggatgtccgattttgctatagacatagaaaagactataaaagatttgatctccaataataaatacttccagttctctgctgattggtgtccggactgtcaatacaccaattctatttggactaaatttggtgtgactgaaaaaatgtttatttttgatattggttcatttccaaaagcagaccaagaaaaatggagatccacttttcaagaaatcactggcagcagaaacttacctactattttagtggatggtaaaatctggggtactgagaaagaattgcataattttgaagataatggaactttagaagctgaattgaaaaagattggtcttttaaaatgatttaattaataaatatatatatatatatatattgtttatgtttatatggctatagtcactaactaaatctgtttcgatgcatattattatatatattattgtgttctattcaaattagtatattgttagttctatgtaattggctctttatataattaattaaagtcaatgaggtaatcattgtcatcatcaccaatacagaattaattggagttgaattcatcgagaatgtggtatgggtccacttatcaaataacctttgagttaaattaaataagccacataaacacataagcaagccgtatactgttccaaatgtcttaaaaccaaacacttttgaacaataatctgaaagaactgtataataaaaaggtctgaaaacaactaataaaataattcctaaaaggttactgtaaaaggaattgggaatcaatcctagcatatcaatgataacagaaagcacagatagtattgttaggatagttaatgttgtcaaattatctagtatgatcccaataaatgggataaatataagaccacctataggtaataaacaatcaaataatttatttatttctattgcactgttaatgacattcaatagataagtttcttgagatctaatagttgcgataaaataatttattctaaccatgataatagcagcaaacactaacatcaactaaaatcatggactccttaattgggtccacatatctttttcatgtaatataccaaatacacctccactttttctcttcaatttgttctctacgtatgtctctagtatagacttagatcttgaaaaagagttggttccggtgctattggttttataattgcaagaatgtctttgtatttcgtttttatttaataaagacattctttcaagattacttgatgtaatattccagccatcatcaccttcagataattgtccattcttatctaaaccttcttctgtaagttttgcaacggctccagtatttttatatgttttttgaggcatgaatgtacattgacagaataagataaatgcagggattgccatataaataataaaaaaattttttaatgataaccctattatcaccatttgataaataatcttatataaccaaaataatacagaggatgtgttgaaacaaccagttaataaacctaaaatagcccctgatcttttagggaaactatttgccaattggaaacatgatatgaatacgaagggacctcccatcgcaagaaatacatatcccagtatatagcaatcaataatgggataccattgtctggccataataaaaaacgtagatcccaatgctagtaagatggaacctataatcccacagactcttggtccctttttatctagaataaagccaactgggaaagctataagatttgttatagcaacactgattacaaacatgtcattgagtttcaaatcttgttcaatacatacatcgttatgttgtgttaaattggatagacaataatctgagcagacaccatcttttactaatatagtcttaaaggctgcaaatccaaaaattattccagaagaaaaaaggcaccatattgtggcacatgttatttgtaataattttagagaagaattagacattcttttgtttcttgtcatttaccgctttaagaaatatggaattgaatagtattgtcacattcattttaacatatattcccaatgttacatggtttttcattttttttggtatcactatattgatacacacatgcttacagctttgataaagaaatcaatgtttcaacctttttatttattaatatctgaaattctcataaaaaaaaaataaacaaaaaatagtgagtggtagcaaatttttatttaaatatatgtgtctataagtatacatgataaataatatatattgtgtattgaatattgtaggttgatttattccaaagtcgaatcaacactttttaaccacgcaataactttcttcaagaaacctcttgaattgggtacaaaatggccacctgaatgcattaaatgagttttggttccctctttacaacatcctaataaggcttgtaccttttctggtgcagatacagtatctaattcaccttgaacatgtaaagatggaatagttataggatgctcatcatattgtttttgatatatttccggcttgaatctaaacccacttacaagtataataaatttcaatttaggttgttgctcaaaggttaagttgagtaaatgattaaattctgtagctaaataacccaataggcctgcaccttgactgaatccaagaataccagcaaatggtccctctttaagaatgatttcacgtaggtaattgacggttgtttgaggtagaaaatatgttttattaataggatcattttgtagccacgccaatatttgattatctgctgatgtaacatcagattcaaaatcaggcagatctgctgcaggatatctattgggtgcagttgcataacaaaaagtaaatcctaatttttccagttctgttctgaatcctttagtctttgagtggaagtagtcaccagattgagctaatccatgtaacatcaatatcttacggctcattgttttagtttcttatttatttaattataggccaccttcacgcagtttcattaattattcatacaaaatgtttaaacatttgagaaacagtatgttatagaattcctagtacaagcagcaaatgaatttatttttatattcataaccgattcaaacatattatttggtaagtaacaatcactacattaagtagatgtttgtagtcattatcattataatgggtttttcataaatttctgaactttttttttctcattcatcttattacagtttgtaaaaataaaaatttatacacactacaaaaaaaaaggaaaagaaaaaaatattatagttccagtatatttgaataactacatatacaaagagagaaagaaagagagaagaagtttaaactgaagccatttagttgtggtttgtatacataaggggctactgttgaaaaaaaattactaaatgatttttcaaagccacaagctactcggagatattataacttttgacattccttactttctttatttttatttgaaagaagagatgcattcttggattattcttttcaattgttcaaattttctttctttaaaaacctcttaagatgaattggatgattaattatatatactttttttgtagaaattgtataaatttggtattgttcgtttaattcaaacaaaaaacccaaaatactaagacttgtttaatggttgaatgtaggtttctaaacaattgattaattcttcataattttaagtatgagttttatcttgtaaccacatattaactcattctatcttagaaggctcttcagggattaaattattattaattgtaacgaaatttttgatatcaatcgtccatttagaaaatgctaacttttgaacaattaaaagtcatacttaaataacctttaatttttgccatgtattactttgaatcctgaataatactttattttatttcctttagtagcactttttgttgatggcaatgatattgtggggataggttttttttcatttgtaatatcttcattattaaaaaaacaaaaaatataaaatggttttcttcaatatatcttatccattagataataattttcttgaaatatgttgaaatatgattattagagttgtgtttgataatctaaattcatcgtactaagtgattaaaagtgatgaaaatttatagtaaagaagattcgaagataaaatgagtatactgtataatattgtatcttgtatattacttatagagaaagaaaaagactaagcaatacaataataatttatagtaccactaatttcctactataaataaaaataaaacttataataccaccaatatcctattgtaagttacattatcttattatattagtctaaaatgaaccctactagaatttttgattccgaagccttgcgtcgacaaaatagaaattggatatattgaattatttagagaaatattattttctgcattgatctttgtagttgaattagatcaattgttttccacttggcagtccttggcaaatagaaaataaatataatggttatcatggttgttttcaataaaagttttttatcatattggatagaagaatttctttttgaacaaaaaaataatttaaatcacaattaatagtgtactaataaaaaagaggaatgtgtaagacttattaaaataagaaatagtagagtcgtaaatataggaagaattatataaattaacaaacaatgggtaacacattgaatatgttgagaatgagcgcctttattcattggatatatagtaaacattctcaatattatattaaacagattttagtatacaaaattataataaagttcttcactttctttctctatatacaacatggaagtaataatacacaaagattgtaaataagataaaaataatgtatgataaaatccttggctttatatatgttaacattaagccattttcctctacgaacagtaagatatttaataaacaaactcaacaacttttggtgacctctcaacaattattactcgacaatttatcgtttagtgtctgctaaaatcttattgttctatctattttattatagaacattctatttcaacagaataatatgtatattaaaagccaagtggataaaaaaatagcacctgagtattggaataaacaaaaataaagatatggcaaagagatatatggagttactactaacctgtggttaggagccaagagccaagagatatcctcaacttttcattttttatttttttttttttgtgtgttgtctgtattaagttgttcgtaacaaccttgtttatctacaatcaaagtggtatatttactgtatattttgacctctacacacaagttatttacaagcaccaccaatttcttaatgaagaatattattatatagatttaatacccttattattttaataaaaagaaaaaacaaaaataattaaagataagaaacatatagattataaaaatatatatttcaattagaggaaaagaaaaacatcaagaaaaatcggtatctcctctaaaaaatgtaaaaacaaataaatcattaggattttgatttatataaagtgtatatatcttaaatttttgaaagattcttttatattagtcaatcattaaataataataacaatattaccaatattaataatcaaaaaaaaaaaaaggaaaaaataaggatgactgctgaaaatattagtaagcagtgcttactaagcgtcggtgttttatcttaagagaaaacaaaacaaacaaacaaaaaaacaaaagtttcggagtttaaaaaaattaaatatgtcatttatcagaacaatagaacactaggcgttattatttccccgcttcttgttttcttttttttctttttctgccccaattgcttacttaagattaacgtaatccaacttcttttcttgattttctttttttactaagatattatataatatcattttaatgaacactatgattcaaaagaatgtatgtttaaacaattaaataacaactctatcgacaaggttttgataaacccgttatttatctagttggtgtcttagtcatctggaaaagtaaacttcactttatcttttggttaagaaataaaggaaaaatgagtaaaaaaaaaaccaaaaaaaaaaaagaaaggaaatctaatataaaagcagaatagttttttagaactagattaatatattcaaattattttttatatccatcaatttatctcatggtactattccacaatatatcatagtagcaataaaattaattacaaacgattaaactgtcaaataaagatattaaaactcaattacttatcctgaataacaataacaataataattatactaacatgtctccaatttacagaactattcaaaaacatttcattgctttagaacaagaagaaggtgtgggtgctcgcgttagaagatctattggatccatgaaacaaaagaatttctctcctttcctcttactagaccatttcactgtctctcaccctgatggtttcccagatcatccacatcacggtcaagaaactatcacttacatgcatcaaggtatggttgcacatgaagacttcactggttcaaaaggtgttttaagacctggtgatttacaattcatgaccgctggtaaaggcatcatgcattctgagatccctgttttaatggaaaatggtgacgctgccataggcttacaattatgggtcgatttacctaaagatatgaaggattgtgctccacgttacagagatctaagacgcgatgagattcatattgctaaaccaaacgaacatttaactgtgaaagtcattagtggcaagtcctatggtgtggaatctttgaaagaattggcttatacacctgtggaattctatcattttaaatcagataaaaagggtaccgagtttgagcaacaagttccaaccaatttcaacgtcttcctatacgtcatgaacggatccgttatcatcgatggtaaggtttatccacaatattctactatattctataataccgatggtgacagtgtcaagggtatgactggtaacaataacactgagtttgctcttattggtggtttaaacctagatcaatctgttattcaacatggtccatttgttgagactagtaaagaaagattaattaaggtgtttgaaaatttccaatatggcataaatgggtttgaaaaagctgttggttggaaatctactattcgtaatggtatcttagaaaaagatgtatcgacatttgaaaagtcttccaaaacgtaaatgaaataaaacaaaaacagtaacaacttcatataacaataaaatttttataatatacatacatatatatataatttaagctagtgtacaataaaatattatttaatttgagtataacaaaaataatataaataataatagtgatagtattaagtgtatgatagcattaacaattaaattttagctttctttctggttggttcaccaacttcaatatcagtagcagttgtgtaactttcttcatctgaactctcaaagtggttgttttccatctgttcatgatcatcagtgtttaattcagattcactatcatccaaatagtcttgttcttcgtcctcttcatcttcctccatttgatcatatttactctttagacctttcatttttcttgtttgcaatttacttaaatcttgtttaccaagatggatacgaccgtagtgatcacccatatcatctctttccacattctttttactcttagcttccaattgttttggtcttttcatggcttctttaaccatctctgcacttggggtatgtacacgaccgatcttgaaatccaatcttggcccggtctcttgtaattctacacgcggtaatcttttcccaccttgctcactacggtaagttttcagcttatagactctgaataaaacgtttggcaatggctcaccatcgtggaaatcgccttggatggtcaacgagatgacatgctgcaaaccggcgacgtcttgtaaatctgtgacttcacccctaaagaaatccaggaacaaggacttgatatgcttatagacagggtgtgtctcgaatgcagagccttggaaacaaaacattggcttcagaccaagattgaaagtctgcttcctgaaatcttgtaataacttccaattctcgacgacttgtaattcgatcatatcgtacaccttgtacccgaaagttctaacgaaggtcaagttgtaacgacgtttttttgagtgggtagagagcacaagcaaagaggtgtcgtttttttcgctaaaaaattccaaatttgagaaatcctcaaagggtttaatatcattctttctgttgaatcttttcatgtctggtttcttcaacgcacttagatcgaccatgatgtcgtgtaaggccttgtttgaggtttgtccagggatgaataaggcctgtttcacgttttctaccaatttagattccctcttctcaagggctcttttggacctagcattctttggcttgactgttctgatcataactggtggggaagaaaatattattaaaataaaaaagtagaaaatagtctagtgtttccttttgtaatctttttatctgcttctgcttcttcttctttttgttctttagataataatatgtgctttcaactatttaaacataagttataaaaatggatatcggtatacgaaaagaaataaatagtattataaaactggagaaagagagagagagagagagaattactatgtagaaaaaaaaaaaaaaaaaaaaaaaagactaaatctgaaactcatcgcaaaaacaaaaaaaaaaaaaaaaaaaattttttcagacgaccacccagacacccacacaaaaaatattactcggcggcaaagacagaaaaaacagaaaaaaaagagaaagaaaaacaatagacgttagacaatagacttttccagtgatgttggtaaaaaattcaattctagcagacaaagaaacgacaacaaaagaattgcacgtgactgactttatttgttctcttactgcacacaaatacacaaaaatacatacggaaaaaacagacgttctctatttctctttctctttctctctgaatgtttttgtatatttgtttttgggaatgtgcgcgtatgcacgtgatctgtttacagttccctcccaaataggaaatacagactacaaagcacaaaaaaaaaataggtaaagaaataaaataaatcaataattaaaccacaaaaaaaacaaaacaaaacaaaataacaaagactaagactgaaaagttggttcattatcatcaccatcatcgatatcatcattcgctcaaatattatgagcttctggtgtatctatcttgtctttgaattgatctgaatttattttacttattattaatattaataaataaaggaacaaataaatacaatataatataatataatataatataatataatataatctaatatattctaatatggtaaggtatatgagacctagaagaacttcctttccagatgaattaagtcctgataaattctcaatacaaagtaatgacaaacaaaagaataatactggtcgtgttgctactagtaatactagtaatactactaccactattactacccctaataagaaatatcccacaaatatacccattcaagaactagaaaacttgtttcatataaaaaaggaaagaaaagatacaaaattcatgaatcatttgcaacagaatattcaatttgccaaagaaaataatttactcaaaattaaaatcaatgaattggaatcaagattaaataatctgttaagagagaatttaaatttaaaacaacaaaactcaatcaatgaattacaatataaaaaaacattaaatgaacagattaatatcttggaatatggaatgtttaaaagattcgatgaaattattctcatgtttgacaatataagaaaaagagagcatctatctatcaatttaaacccactttggaataaatatcatcctgataataataataataataataaccatagcatgcctaatccatctaattctctgttgactccttcaaaaaaaagaaatagaagaaaatctatgtttattcaaagcgatgacttaccttcaataaataatgatattcaaaataatcctatctcacaatccccagataattatattgagaaattttccattccaatcttgaaacatccagataattcaatagatcaagatgcatttaatattgataataataataataataataataataataatagcagtaacagcaatagtagtagtgatagatctagtccttctattttggattattcaattccagaagaaccagaagaaaaattggataatagtaaacagaatgatactaagaaaaataacacaaaagtacaagatgttagtatccccattcccatagcacaatcaaacgatagctataaacaacctgccactccatctgaatctattacaaaaaaaaatcagcgcaaacgtaccaagaaacatcctccaaggactcaaaagattacaaaaaaatcaatttcaaaagacgatataatgcccaatacaacacctaatattgacactgatatagatataaataaaattaaacattcaaaagaaaactcgttttcatctggacaacctgtcttagaaggtagatcattaagaaggtccacaagggggaaagttgttaattataaattaccctcattaagagccaaaatgagaagacctacagaaaaattagtagatgctaccattgttaatgatatacacgaatatgaagtaagtttgaacaaaaatacaatagttaaagaagagccaacaactccacctctgaaacatatggctgatgaaatagtttcggattcaaatcaatataaagctaacgataaacttaaaaaagaggaaattaatttttctaaggataaaagtacaaaactacaacaaagtatcccttgtactgatcaatcggtgattataaatcctgataaacataaacttatagcctcaaatccaaagagtacagctttgagaaagaaaactgaaatatacaacgatctcccgcaggattctgctgaaacattctctgaagatcctgatgctataactcaagaggtaaaatcaaataaacttactacaaataaaccatcaaaaaaaagagatataaatagcatattagataatatgggagataaaaaaaacaatactaataaaagagtaaatcttaccaaaggtgaatgtttaaaaatgaaacatacttttgatcttaaatctaataaaaatttggtttctccttcttcttctccctttttctccatttctgtctcctcgtctaaaccttttacatcaggtaaattaagctccagtaataataataatagtaattcttccaatcaaatactatctgatattacaaacaaaaataaaccggggaaacaaataactaaaaataataaaaaaaaattattaaaaactgcaattattaatgatttgtacaatgacgcagaagatttagatatctatgacaaatggaataaaaccacaacaagcccttctttatcttctgcttcatcatcagcatcatttagatcattatcctcatccttccattatcaagagcccagaaataataataaagaaaatagaactattagttttagatttagtgatgatgatttatctgtatttgatttactagataaatcaagaactaatactaagaaagtaaaagctaaatgtaccaaagagaaaagtaaataaataaaattttatatagattatcacataaatatagaattcttgcataaatagataaaatatatatctaaaaatacactgtaacataattcatttcataaaaaaaaaagaaatcaattatatttttcattgttcttgaatctttaatttttaatttttttttttttaatacttatctgtattactatttaattaacttggccaaaccaataattttattggtccctgaaactctaatgataataagattttctctttcattcactgattcgaaatatggtatcgtatcttgccttgaaagttcgcattcaataacgattatggatttactattcactttattcatctttaatatttttactgtattagtatacatttgtctgttaataattaacttcataccaattgttagatttgttaaaatagttatcatctctaattttatagtaattgagttcattaatgtcactggtgacaaaagtgatgtaacaaaatctccaatctcaatgttatcaagtaaacctttttcatttctagatgtcgacgaaagtaacttcatcgttacaaatgaacttgggaacccaatttgcttttcgtctgtatcatttttaatctcatcaactaggaaatttttggataagggatatattctaatagattcaccagcctgaatacaaccgtttataatccatcctgttatttcattcttagatacgtcgatgtctttaatcgaaagagaataaaactcatcttcaggactcctttgatcccccactgagacgttagtgttacttatatccaaaacattattatgctttgattgttgacttttgtgatcttcttttgaaaattctttaatcttcttttttaaggtttctacaagagacaaaccttgataccaatctgataaggtatttttattaactatcccatcaccagtaacactactaataggtatccaggatatgtcttcctgatgaaatcctattgtatcataaaatgtcttcaattcatttacaatttcatcatatctaccttgataccaatcaacagtatccatcttatttaaaacaacaataatgtgtttacaaccacaaaatttagctaatatagaaaattcaattgtttgtccatttaaattaaaacctttttcaaacccatctggtgaacaatctataaccattataacaatatcgttattaaacatttgtgttatcaattctgagttaacattctgtttgcttggattcacaaaaaaggtaaatttcccataacctttaatgcaaatatcatgtttatgtaatatctctgaatagccaactgatctttctatagataaatcatcggataaccaagttaaataggtatgcttgttttcaattttgtttctgttacatagatttttcaattttcttatcgtttcaatatcaacttttttaaaatccattagtagtcttcccataagcgtcgatttccctgatagatgatgacctagtattgaaattcttaaattattaggtctcactaataaatattgatgaatatctaacattgtccttgatttaattggtaactgtaattctgtatcattatcgtcaatattattttttttagaaatatttagttttgatattttcttattcatatcatcaaacgctttggattgcacttcaagaattatatcatctggacttgattccatgaaattttgcctatatttctgtcttttaacataatctaatggttcaaagatagaaaagatatcagtatatttcctcttaattgcttgggtcatagttatgtaattcttgtttgctacatcacttttctgttgaataaagtttataaactgacctttattggtagttgaagataagttagaatcagctgatatggaatatttttttgttagtttatcaaatttactccaatttatattgatcaataagttagattgtgagtttccagatatagagtcgttgttgttgttgtcataattattattttcattattttcattattattagtttgatcagttaaggctatttggttattagacaatgaagatatatttttctccaatttgccctcttgttttcttttcctaatatgatccaatttggaactcaacgaagaattagatgtttttaaaccagttattcttgaaaatttatcattcttatcagttgtagtgagaatattatttacagtgcttttttgtaatcttgtagataaactgaattcattttttggttgtgatgctcgttgttctattacaatagttgaattattggtcttatcagtcttcccaatagtattagttaatatttttttgtcttttagactttgtaaaagtgtggatccttttgtaattgattgttgagtagtttctagttttttttcctttaaagcaactaatttatcctttaacgacagttttttttctatagcagttaaattatttacttgattaatattttgttgctgttgttgtctttgttgagctctcttccttgccaattgttccaattttgacatgggagggggattagaattattcatatcatcaacattcattatgaatataattttaacctttattctataattatctggaacaacaaattataatgtgatcacataaatttgttatttccatatttattcatgcatctagtcaccataaggattaaacaatttcactctttcaacaacgtcaaaaatttaaatgtttgtatattttgtgtattttgtctatatatgtattttgtattttttttccctgattttctaatatatataaagattccaatctgatttacaaatgatagatgtgataataataacaatacttatacatatcaatgagtgtaaagaaacctacacacactcatttccaccataaccaaaagataagtttataaaggttaatttttaaaacggcaagaactttacacacaagatgtcagattttaataccgccaaatatctgaataaacagatgaaatcacgtggattacagaaattaaaatactattgccaagtatgtcgtaaacaatgcagagatgataatggatttagatcacatatcaagtcatcttcgcatttaaagaaaatcaataatgttacacaagaagatattgacaagttcagcaagttatttgaatcaagttttcttagtctattaaaattgtcacatggagaaaaatggattgaagccaatagattttataataaatttatccaagataagaatcatatccatatgaattctacatgttttaaatcactaagtcagtttattaaatatttgggcaaaaatggtaaaattagggtaagactagacgaagaagaaaatgataggtttgaaaataataataataatgatatagacatgggccagctacaaattagttatgtagatcgttcaaaagagaatatactcagacaacaaagaatcaatgaaatagagaataatactaaagatgaacaggaaatcaggagtatgttactaaaaaaacaaatagaaaaaataaagagaaaagaaaagggaaaagaacaagcagaaggagataatcaaacaaataacgttacgactgtcactaataataataatgaaataatattagacaataatatccaaatgtcgttgtcaatcagaccaactaatgcaaagaaagttagcaaaccaaaccagaggaaacacaaagcagcaaaaaatgtatttgattaagaacgtattaaacagctaacacaaccgtaccaattatgtatattctatctgagttctcaaattatttgccatcaatttaagcatcatccaacattttagctaataccatcgtgtccttcctatcttagatagcatgacagtatacagccatttttattttattttctgtttttatacctcgagggatttcttcgatctcatcgcaaaattctgaaaaaatcaaaaaaaaattttttttcttcgtttttgatgcaatctaaccttctaacatacaaaaagagagaatatgtagataaatcattgaatatataatatttgaataattaaatcgaattctttatggtacaactgatttgaatgtatatttaggttcgttaagcaacgaatagccatacattcatagaaatatttttaacctcccctccaaaaaaaaaaagaaaaaaaaagatgtcaggttcaaaaaagacacatgttaagtttaatgatgatgatgatatatccagtaatatcatttccactattactgatttagatacaaatatgaataagaataagaaaaagaaattttatgacagtgacagtgacagcgacagtgacaatgatgcaccagaagaagaaggtatggatgaagctagagctgatttagaaaagagagaaaaagaacaacaattgttgattaaagaagaacaacgattattaaaggagaaaaggaggaaacaaaacacgatttttaaggaacaacaattagaaaagaaattaaaaatcgagcaacaacaaaaggagaaagcacaagaaaagcaggacgaggaagaaggtggtttggtagaattgtctgaagaattccttcagaatataaacaataacataaatttagataaagaaagtcaaccccaaataataaactcaataaataggtcaagacatatcaattttaatgatgaagaagaacatattgagagtgataaggatgaatatatgaagaataaaaagataagtctacaagaagaaaaaataattaaaaaaattaatgatcaattaacgaaaaaaggtaaaaaaagactttaagaaatttaagaaaaaagtggcaaagaaaggccctgtcactgtcgaagttttgtcttctggtattgaatctaaagtcatggctccaaagaaagaaaccgaagttatgattacaaaggatagatggctgaaaagaaaatcattaaatagaaaataagtattttatatgaattgatacactttcattcgtgtctttcttttatatatacctagaatcaatgatattcatctatacaaaatttatttttttaatgcattaatttctcatatttactatataagctctattatccattagagttaattttttcatgctcattttaattctctattaatcatcattctcttataataaaggatattatgactggcaatataatgccacataatatataaacagatttatcatatttcaattttgaattattgttcatatttgtgcaattatcatggttataatcataaaatctagtattaacttgatcacttgatcgaattgatgattgattttcaactatcttataatttcttacgtcaactaattcatcaattggaatattatcatttttaaagtcgttattcttgatagtattatcatatgaaggtgacccatacttattaaaaatatgagtatgaccattttcttcatcagaagaggaaaaagctgtaaaggcagcatataataaactaccaccactcattaataataaattcccacttaaccaattcatagtctctaactgttgtaaattgaataatgatagaattacataaccgatgggagttgaaccagcaaatgcaaataaattgactataacttcccatttaggcagattttgtcttgaaatcattaaactgctcaaggataaaacagctggaatcttatgtattacaatagccaacaacatagcaattaacactgattggttattaatactactacctaaagctaccccatctgataacccatggatacagagtgcaaagacaacattatttttcacaatgtttagaagtacttgttttggatgtttaaagatatctttccaagaagccaatcttatcgaatttgttatattactgatagaaccaggataactttcttcaatagacaattcatttctgtttaggataagcccagtgaacctatctaatacatacactattagatacccaattaacaaattcaatccaacattaccgtcattggccaaacattcatttacaccctctggaataaccaacataaaagatgttcctaataacattccgacaccaaaataagacaatatttgaacatatagttcttgttgatgatctaggggagtattattttcaatattgatattatcattattgataacttcaaagttcaaacctttttttgaaagccagaataatggtaacagacctataacgaatgtgatcactaacaataatattgaaactactaatgcattaaaaataccatcaccaatgccaaccataattcacgaaaacaaaattttttatattttattactaccttagtcgacttatatcacttttaactttattctcgttgttttgtatcttgatagtgaatttatacacattgatacaaaacaaatttaagaagaaacgttagcgtctaaatttttgataataatcactaatttgagattatcaaatcataaaatgaacatttctgtgggttttatacatgtgtatctgccatacataggaacattaaccattttggtaaacattaagattgtctgcgtcttcaattttctcgttagataaatacataataattacttaattaactctacgcaagcgaattcaggaatctattcatcgatacagacatacattcacaaattaataagggttagaacggattcattagtgtattccaataacttcttacacagttgcatgtagataaccataaaaaaagcattaactgactaaaaaccaaagaaaagaaagagatatgaataatgaaaagatgagcagtccaatagacaatgctatatcacttggtatcaccttcttcaaaaatgaacagtataaggaagcaaaaaatctatttattaagactctttggctgatcaaatcatattcagaagaagatattattcagattagagcaaagcatggtttggtcaattatgatatacctaatgttccaattgtacacccacaattaatcaaaatattagacaatattgctgcatgttatgaaaaattaggcgaactggaaaaagcattaaagatcagtagtaaaatgattaagaaagaaccatttaatttgatttgttatattcgacatggtaaaattttacagaaattgtttcgagaccaagatgcttaccaaaattatcaaagggggttaaaagaacttaatgaagtatccaaagaatacaatattaatgtgtctaaaagactagttaatattgttaaatatcaaatgagtttagttaaacagagaattcagagaacagatgcatcaaaacaagaaaataaaaagactttttcacaacgtagttttattgatcctataaaggaacatcagtcattattaaagaaacagcaacaaaaagataacatatatgaaggagaaagacaattgtctttgtctcataaacgaaacatatattctaccataatcaattcaaaagatactaaacatcgtagtaaaacaattgattttatagaatctttacccttagaattattacagtacattttgaattgtctaagtgtaaaggatttaattcatttgtgtcaagtatctcataattataaatggattgtgatgactaactattcaaattggtttcaagattttatattgaagtcagtaacaaataaattgtttcttcaatttcataattttatcacaaaactgtactccaaatctctatcggaaaaaaatgccacaccatggctccgctctttaaaactatcaagccgtttagcatctgatgaacctaaattattacaaaaactgtttacaatgctacaaaattatcgatgtgatgaattaatcctatctgtacctaattgcgcaacgtcacatattgttaggtatattgtgccaaatgataatttttgccaaaatataatgaagttatcattaactataagtcttcgatcagataaaccatatgaaattaaattattaaattattttaataatttaactaatttggaattgatatttgattctgccgttgttccagttaatcatccaactcaaaataatagtaataacagtgaaaatagcgatcttgaatcacttaataataattggtctccaaatttacaaagctatacacttatatgtgattctaaaaagattaagaattttccaacaaaaaatttttttacgtccattagtaacatcaaatatgatttgatgactaagttatatataactggtgtcacattttgttctaatactgaggactttaaatggttacgaaaattcccttctttaaaagaattgtggttggagaataataataatagtaaattatcaaatcttttaaatctgttcaaaagagagcatatatttaaaaatagttcattagaagtattagtgtttagagaaaatcaaatatttccaaagatagatatggaagcaattccaattcaaaatttataccattacaaacataatctgtcaagcttaagaaaactagatttaatgggtacatcaattagcgggacaggattacatagacttgtagcgtctttatcttctaaaacattaagatctttaaacattggagattgcccatatatccatatgcaacaatatccaaatgattacaattcaaatgtattttcaccttttgattttttccatgaatttgataatatagaagaacttagattaccgcaattgagttctttgaatgatcaatcactgcatatgttagcattacaagtaccagatttacaaaaattgaaacttttagatttgtctttaaatatgtcaattacaggggtatccgtttatgaatttatatctaaattatatgaaattaaaaataaggaacccttagaccatttagtggtagatggatgtagttcaatttcacatataacaatcaattccatcaaagcattaggttatgttaaaaaaattgattgtgtttacgaacgagaaacatggaaacaatttggtgtcaactcttttaagtacaaatagtctttgcaaaataattattatatgtatgaatgtatcgtgttgctaatagacaaaagaaaacaaaataacattgttccatctataaacataacatatctctatcaaattatttcattatataaatatacgtatttagttatttttacctttactatttataaacgaatctacggtgcgatcaacgtagcctgtttttgttgaatcatactgagccaaattatttgtattaccatcaatattttttgaatatgaactatctggatcatcaatatttgtctttatccttgatgcggaatctactcttgcatagttatgattagcatgataatattggtaatcacggatatcgataattgtattagttgtcgtatctgctcttttacgattatcaacaaatgtattatttttacctgagaaggacaaagctttattgtatctaggcctttttggataatatagcatcaacttccctttttgtgttgacaatggttgaacatttgaatttagccttaagctcatggatcttattctatgttttttccataaatcttctaaattagtgttttgaataaataataatgaatctttattttcagattctattaaactatcatctaataaattcggatcttgattgagccctattttcgaggcctgattttgtacaatgtgagctttatcagtcaatttaattaaattatatgcatcctgaaattgcaaaggattttttatcgaagaagacatcagtaattttgcctgtaaataggtaatagctttgtctaataaaaattcttgaccacaactatttttaatcatagataattttggccatgttgcacgagctcccaaagtcgtttctcttaataagaaagagcgtgatggatttctcaataattcatatgattgatttaacattgaaaagtcaggtaatattgtaatgttacccgaatattgttgtgagaggactgatgctaatttggttgtaacatttcttgctataccaaattcagataacatatctaatccatgaataacttcattattcatatatttaaagacattagtcaaatgctgtttaaattttgcgctgatttcattctgtatttcacctccaacacatgaaactgataattttaataaaggaaatacatgtggattcacttgacacgcgattatatgatcaatgttgaacatctctgacaaccgagggataggcaaatcattctctacagaaccatcgacaaatttagctgatgttttacccaaccattcccttatattaccagtttgtggatccttttcaaatagggggtagcaggaaaaacaccaggaacagaacaagatgcacatacagcagaccagattaaaacattaggggcagtcaaattatttaataatcttggctgctcatatatggacgcaggagatacagtaatatttaaaattttacctgttctgaaataagcttcttggaaagttaaattgcctaaaaattcaatcattgtattttttaaatgtttattatcgaaccatgatccacctttcaagaatcttgacaatttcaacaaaaaatcactactacttggcttatctctttcatctttaaagatattgaattccatgtttaatacattcgctaacagtgatggaatttcatcttttgtatgaatacaaaatatactggctacaatggcacctgcactagtaccgctaatgattttgggaataaattcagcttcaaatagagcagcaagaataccaatatgaaaaagtccaaatgtagcaccaccgctaagcatcaaagctgttttaccaatatttctctttgtttgttgtaatatgcctaaaagataattgtcatccaattcattttgttccaacaaacatttgatacttaattcagactcttctaaataatcttcaatctttttcttagttccaatgttacaatgcctatacagatttacgttgcccaaattgcccaaatttcttttccaattggttctaattaaatacaataattcggaataatttttatccaatctaaatttcttcatagattcagtcaattgattaataagttcataatcatacagatcagatttcatgtttaatttccatcgatctctacctgttaattcatctaattttagagacgttaatttccattgatcataagaaatagaattttgtctttcccattgcaaatccttaatcaatagatctttttcaaaaccatacgaatttttaccaaggaataaatattcattgcatttaactagaaatctagataatttagaatttgagggtaaaattatttcattgaattcctcttcctcctgttcctcctcacatatatcatcatttgtcgtgattgtactagtattgttgttatttatattatccgtgctgattaagaccttaaacaactggtcactattccgatgatccaacaagttaggtccattgggtatcaagtcattattggaagaatagaatctttcgataagatattgtgtaacaggatatgaacttttctgattttgttcaaacatgtttctctatgtacctgattttcaaccaacaatacacttggattcttttctctttttctaaaaataaattatagtatagtgatgttaacctttatatgacacattaatacaatctatatacccataagtatttgcttttttttttttgtattttcttttaaatatgatttatactacacaaccggtttgaaacacaagtagttattaaaagcattcatcaagtataattttttacttactgcagataactattacattagtatttaaactacctaatccaatatcacattcaattctgtatgcaacaataaacatttaagaggggaagaaaataaaagagtaaaaataaaaaaagaagaaatattaaaaatttctttttcttcccttattttcctgataaccatctagggttagaatatcaggaacaaatatttagagcttacccttacaaataaaatagggttgtaatatttttcaagagaaaatattaaaagagaggaacatcatgaatccacaattatattataactggataacgatgttccaatgccgaactgaaatcctacaggtaatacaagacaaccattataaaatttcaatttatttcatccacaataaggtttcacctacttatgactttgctgtttcatccatctaattttatcaatttttgataattttctttgttaaggaaagacaataaacaatcaatttgataaagcactggtatggacaggcatttcagcttttaatacttctaatcatgttatttttaagacaaatatttcttgcctgatttgttctttcttttgatacgcatagaataactactatcaaaattatacatactttctaaacatttgtgttacctatcagacatatctatagagcacgtgtaattaaaatacctaagtattgataattatatctctgcttatttgtcctttctctctctctcaaaaacaaaacaaaaaaaaaaacaaagtgataaaaaaaatttttttgtcattcgcgtcgtgtttatttactattgaaaagctattgtcttttggtatttactttttagctttttcgtggttgagaacgaattgaaatacataaaccgataaaaatacaagaatatatctaaagatattaaagcgatcttccaagtaaagtgctaaatactcattgagaatgttcaacaattgtccatttcctcatctcccttctcgacatttaataaacctagtgtccagtgagttatcatatttgattttcttcttttttactttctttcctttctttagacctatttgatcttgttctttgtattggctggttcttcatactatttagtaattgactataggcttaaagaatatccgatagtttcaagcacgtgtaagcttatacacatattaaaaagaatacataaatacatatacatacatatacatacatacatacatatatatatatatatatgcgtgtgtatgagttttacgaggtaccatgtatgtgtctatgtatagttcgccatttcctaaattaaatcccaatgttaggtataagacagtcttagagagagcaggctttgatgttatctatgacacaaacaaaaataaagataacggtatattaagaacaagtaaatctacaccaaatttgaggtcgaagaacaaaaaaaaatttgaattttctaataaaaatttcacaaatgatcacatcccttataacactgataaatatcgtaataataaagatattgtaattactaacggtattaactctttaggtagttcaaataatattgactctgattctgcaaacaattcaaatataaatacatctcatgatgactctttatttgattttgagaataataaatataaaactgatactaagagtaataagaataatcgtgatgataaagatatcaaaaatatttctgggaacgattcttgctcaaatgaattgaatgatactagaaatacctcagatttggagaatgaaatatctaatttgaaaataaacttttcaataaatagtaaacaagcgtttggtggtagtcctaaccctaatccaaatgtaaatgctagttctaaaattgaattggagaaggatttacagaatcaatttagtaaacaaaataatctaataattgatgatattaattctaaattatcaaatatacaaaatggtgagggcgtggtagagagaaaacaaaaaaacgataatgatgataatggcgttgatgctgatatctcacattctacttctacctatctatcatcttcaaataatagagaaattgatgatatcaaggatgagaagtctatagatgaaaattcattaaataacgatatgagtaatacatcagagactagactgctatcattaataaatataaataaaagttccaaagaattacaggctgttaaaccactacgcctaactgtacaaaacacaaaatctaacaaaataaatgaattgattgaccaactaaataatagcgcattgccaaaagaaaatgagctgaatttactaagtagtgttacttcttctttttcttcttcttcgtctcctgggttactattggctaataataatattggtaatacagaaagaccaaaaaagtcaagctattatttatctggattacctattagtgatatagaagaaatacgagaggctatagaaccaataacaactacaacaacaatgacacccacgacagtaccaccattaaaggttgaatataagactggagagggaccatgtagaatgtgccataaggaaatcacattcaatgcgagatttgctaaagaattgactggacaatggcatcgtgattgtttccagtgtattaagtgcaatcaaaaattcaacaaatctaatccatgttacatattgaatgacgaaccatattgtcaaatggattatcatatagttaataatacaatatgtaagatatgtgatatttttattgaaggtgaatgtcttgaaaatgacaaagaagaaaggttccatgttcgttgtttaacatgttttctatgtcatgaagtcatcagaaatgattacttcttgtgcaatgataatataacagtatgtgataaacacgatatcaaccaattaatgtctgatggtgagactggaaacaaacttgggaacaatgaggaacaagaatccctgtcagcaacaaatatcaatactaccacggtaaagaaaagaaggaccagactattaaacttgtaacaatatatatatcccatctatttgtaaaagcatatatatatatatatatgtatgtatgtgtatagactctgacagagtgtcatgctatgtatcaatataacctataccaatatccatcaaactgtctatgtcgctgtaatattgtgacactgtaaatacaaaaaaagtaagcgggaaaaaagaaggaacatactttcctaaataggaaatcaaaacatgtgatataaaaaacaaaaaaaaataaagggaaaaaggacaaaaaaaagaaaaaacaaacggaaagaaaggaaagcgaatagattaacttttgtaaacaaaatatacaggaaggattagttagtccaaaatccttttaaaagtacttttctatttgtcatatccctgttgagagtgggtgttgtctcagtctattattatttcaagcacctacatttaaatgtttaacttctatatataaaactgaattgatttgatttactttgaactgaattgagttttgtttcttttaatctcgtctggaattgataaaaaaaagaataaagaaatataagctaataaacattactttcaaacaaagtacgatatttatagtaatcataagaattaaaagtactgtttttattatacgtgtattaattacaaacttggaaattttgttattattaacacacaatactcaatataaaaataattaaatataaaaaaaaaagaaaaagatggatctcattactaccccggaaagaagtagatcaagaaggatatcaatggatgaacaaaattcaagtgatgggcagacagacttgtcaatccacgaaaagaagaacctcttatctacaccttcacctccaagagataagcaaagccaaaccagatataatccaagttttttagctactcctatacagacccgtttgattcacctagaggatgaagataataatacggaagaaccacattcccataaaccagaaagtatgttatctccatatacatatacacataatcataaccatggccatagtcacaccctttcacctgtacataaatatagattattaccacctactactccaaagacaagaaatactgaaatgtttttatctccttctcctaaattgaaatcaccaaatggcaatagttcattaattacaaaggacacaaaaccaattcgagaaatctctaatgatttaaaaacaagattaaattatgcttttgtcaaattacaaaatggttgggtcgataaaactttacctgaattggaagaaactttggatcacaacaatcatagtggaataacaacaaaattggttaaaagtcctgaaaagtttaaaagtcccattaagagaaaaccatcaaatacatccattaacaataacgcatttccctcttcatatgtaaatcagtttgcatatggaaatggtgatgattttattccatcaaatcaacctcagaatagtcgcaaaacatttaattcaataaagcaatttaacaacaaatataatactaacttacctggtacgattgaaaacagtaaaggtatatctatggaagacagtacaacatcggcacatttggcttttctacaagctttggcttcacctggcaaaaagtcacagaacggagaaataccaaaaaacacatctcctttgaagtggggcaatagcaacgacaataatgatcagagtaattttaataaactgaaaacattaaagttagatagatatggtaaacctgttgagggtgaaaaggaggtagttgaaactttaatgtctttatcctcgccacaaaaacaaaaaaaaccaaaaagtttagatgaaaatgatacaaatccagaggaaaccgatattgaaactgaaagtgataacgactaagatatttatatctataagataaaagcaagcaaaaacaaatattacttgacattcaaaactgtaatattagcgacaatgttcttaatttctaatactgaataaacaaaacaataaagttcatacgataacagtcgaatttgaacttaaataggagagaatttgatttttctttctctctctattattcatatggacccttttactcattcatgtatgtttattattcatctttatgacactatcttcaaaatatcagatgttcacagatgtatttgtatactgttcactattcatgctgtatttatatcatcacatttgttgtttattaacacaatttacgtcattagctattttgaagtcttcggagtttattattatttttattttatttttttttttggttccgagaaaattgtaaataactaaagggttttaaattgatgttacatatattcgtggcacaatattatataaatagcaacaacaactaaataaagactgacattaatatgacatgttagagacaatcaaattttctaatcttttacttgttttttactttttttgtctgtttctttttagctaaacacacatttatacaatatattttcccagcttctttccactgctaggtaaacacactaaaaaatccattaatattgcttttagctataacgtatccgctatcttataatgaatcagaaagacattattgcaaagaattttaaagttgaaacaaagattattgaagcagccaaaaatagaaaattaaagagcgtattagtaccgggcatcgatactttatatattgtttatgacttatatacacaaatattagataagagttcatttaatgataaatatttgatcaattttttatttctccatggtagtgggatgaatagagtcatttgggaatattatattgctcgaataacacaaataattaattcgaataattcaagtctacaatggcaaatcaataaagtcattttactggatcaagtaaatcatggagattctgctgaattgaacagatttaaactaggagttgattttgattggaatgatggagccaaggatgcatgtaaagtatcattaaaggaatttcaacaaaatgaaataaatattgttattgggcactcaatgggtgggttccaagcactctcttgtggggttttctgttctgagtttttcaatttgattatcactgttgagcctgtattagtgccacatataaaaataaaaaattacaaatcacccacatctatgcattcaaagtttttccattccatatggagtaaaacaaaggacacttttaacagtgaagcagaatacatacgatttatggagaatgacagcttttatacaagagttttatcggacatacgtgatagaataattgaatttgagatgatccccattaataagaagggtcaaattagaactaaaatgactcaattacaaaatactttatgttatatgactttaaatccaggagcagcatggctgattgataatttaaaatttatcacttcctctgtttgttgtattttaggtggagtatcaaattggacacctaaagaaaatcgagaagttattgaaacttcgatatcttgtattgaaacacatataattgaggatggagaccacttattaaatttagagatcccagatattgtcattaataagattattgagagaatctccttccatattaaggaaaaccacgatcaacttaaattgaaatcgaatgatctaagtaatattcaaaggcaaactcaatttaccaaaaattatgaaagttattgcaaagaaagaataattgattactcgaaatctgctttatctaaattataattaaaatattaaagtaattaagacatatatatatgcaaaatatcagcaattttattttttctctttttcttctttgtcctccaatcattcattacacagtcataagggtctaaattttaattccataattcttgtttaaaaagaacatttagtttgtgttcgactttctgtaccttcataatttttacttttttccatttcctctttatcaaaaaatttcaattttaagaaaaaaaaagaaagaaatcaatatgaagaaaattgatcttataatagtgtctttgtaagcaaaatatggactacaacctcatgccttccagatatacactttaaaaaaaagaaaaagtgcatattatcagtcatcattccctgtaataatgcaatattatatttatcagtttatatccatttacctttaaacatttattaattaatatacctttatatttttcttaatctatatatattcgccaaaaaaaataacaacctaatagaaacaaaactgatagactattcttttaaataaccttctgttatagtttattttattttattttgtctacaatattattatctttttacatttttctttaaccaaatttaaaatataaatcacaatacacctatatatatatcgttatgacagaatctcaagaatcaccagaatccccaaaaattcaggttaaaagtagaagtgcaagcatatttcctgaaatgagtcaaaattttttttcagatgatgaatctgctgccactgatgactctgtggcggaaaatgatgaattcatagacggtgaagatgactatggatatggggaggaagcaaataaagacgttccagagtcaccaaaacccagaaggtccacaaattatggcagcggacgttatggtaacggtgggagttcaagaaggtcaagatacagcagaaataccggtacattagataggatggcagctaaagatcagtcgctgttacaaacagcaaatgaagatattcctgctgattttgaaccagatacagtctcagggatgtttagatcacatgacttcagttatttgaaattgagacctgatcatgcttcaagacctatatggatatccccaagtgatggtaggattatattagaaagtttttcacctttggctgagcaagctcaagattttttagttactattgcagaacctataagtagaccctcgcacatccatgaatataaaattactgcatattcattatacgctgctgtatcagttggtttagagactgatgatattatatctgttttagatagattatcaaaagttcctgtagcgcaatcgatagtaacttttatcaaaagtgcaactgtttcttatggtaaagttaaactagtcattaaacataacagatattttgtagaaacaacacaagctgatattttacaaatgttattaaaggattcaattattggtccattaagaatagacagtgaacaacacaattctaatacggatgacaagaataaaaatatgaaaaatagtaataataataataaaaatggtataactgatcagaacgtaaactcaaacgatgttgaagcaatgtttagtgccgttgtaggcgaagacaatgaaggagaagaagaggaagatgatatagacatagttcattcatttgaaatcgccaatgaatcggtcgaaatagtgaagaaaagatgtcaagaaatagattaccctgtcttagaagaatatgattttaggaacgatcatcgtaacccagatttagatattgacttgaaaccatcaacacagattagaccataccaagaaaaatcattgtccaaaatgtttggtaacggtcgtgctagaagtggtatcattgttttaccttgtggtgcaggtaaaactttagttggtattacagctgcatgtacaattaaaaaatcagtgattgtactgtgtacttcttctgtttctgtaatgcaatggaggcagcagttcttacaatggtgtactctacaacccgagaattgtgcagtgttcacatcagataataaagaaatgtttcaaactgaatcagggttggttgtttctacatattccatggttgctaatacaagaaatagatctcatgattctcaaaaagtgatggattttttaactggtagagaatgggggtttattattttggatgaagtacacgttgttccagctgctatgttccgtagagttgtttctgctattgctgctcatgctaagctaggtttaactgctactttagttagagaagatgataagattagtgacttgaattttttaattgggcccaagttatacgaagctaattggatggaactttctcaaaaaggtcatattgcaaatgtccaatgtgcagaggtctggtgtccaatgacagcagaattttatcaggagtatttacgtgaatcagctagaaaaagaatgttgttatacattatgaatccaacaaagtttcaagcatgccaatttttgattcaatatcatgaaaagagaggtgataagattattgtcttctcagataatgtttatgcattacaagaatatgcattaaaacttgggaagccattcatttatgggtctacaccacaacaagaacgtatgaatattttacaaaactttcagtataatgatcaaattaatactattttcctatctaaagtgggtgatacatctattgatttaccagaagctacttgtttaatccaaatttcttctcattatggttctcgtcgtcaagaagctcagagattgggtagaattttgagagctaaaagacgtaatgatgaaggttttaatgcatttttttactccttggtttcaaaggatacacaagagatgtattattccacaaaaagacaggccttcttggtggaccaaggttatgcatttaaagttatcacacatctacacggtatggaaaaccttccaaatttagcctatgcttctgccagagaaagaagagaattattacaagaagtgttattaaaaaatgaagaggctgcaggtattgaaattggggatgatgcggatagttcaattggtcgtggtggtaattctcataaaagattgaaatccaaagctttcagaggtgaaggttctttggctggtcttgctggtggtgaagatatggcctatatggaatacactacaaacaagaataaagatctgaaggaacaccatccattaatccgtaaaatgtattacaagaatgtaagaaaataatatttcatacttcttcattagtcctccgttgcctttttttatttcgttttagttttaatatgggttctccttatagttgtttagacttatggtattattattaattacaactctacaatctactgatattatatagatctagatgtatgtattttcatacatttatatatgaatgcccacaccattctatgcatttcttatttttttcataatatatttactattttttggttacctttgttgttcttttttacaatctatacttaaaaatcattacattaatggttttatctcactttttaattattattattacaaatgttttgaaaactaacaagttgattttttctgtttttgtttcattgttgtatgtttaatttctgtagttctcctgatataatctttttgttttcctcgagagaatcttgaattttaagtttaaattccacaatatatgtaactatgtcaaaaatcttattttgcaagtcttgcttttgcaagatcaatgtattttcaacttctgacaattgatgtttcttatcgattatgatttgtttggcgtcatccaatttcttgtcgattattttgtttgtatttaaatttcttttacttaattcatcaatctcagatctttgtgaacttagggacttctcatattcttgcttaagtgaaaatatatttgattggacttgtagtgcactttctctcaattttttagtttcttcactattcattttcacttgtttttggaatgactctatttctttatttaaatcagtaatatcggattggatgttattacagttgttttcaatatcttcaattagtttaattaatttttcggtgatataattttttaacgaaaatgattgatctgtactcacgtttttaaataattcattataatttaacttaatattatcattcaatgtttgtaaagtatctccaatattaattttaaaatcatctacttttggtgaatttctgcctgttaaaataaacctgtcctttaatatcgattgcaaggtctgattatatatatccaatacatttaataaatttttcgctacatttttattttcgattcttttactttgtaaggtagatatcattcgatctgatttatcagatatatcatctaaactctgcaataaaaattcctgagttttatttttagtttcgatttgttctacagaaatattcttttcatttaactgatctgaaagctgtttaatttctttctcaacttcagctatattctcttgtctctgttccttatcagacttcatattttgtaattttttcggccataattttgatttttctttcataacagatatgtaattttcaaatgctttaacatcgttctgtaatgcagtgtttctttcctttgcaattctcaattttgtggccttttgtaaaatagattcatattgttttaatatcacctcattttgattatctaaagtttttatatctaaattgatgattttaataaatttttcaaatccaacttggaatttattcataggtacactaaagtcatcgttggaatttaaaaaacatttataagcatccatggtatattcaatgactaatgattcaatcatagattcgtattttagcttgatcttatcttgttgttcaagtgagtcggggacaggctgattcatttgaattaattcttgtgtgggttggttcaataatgtggaatccaggtcactagaaatcatgtccatcttttcatttaattttacaagccaatgtaaaagacctaaaaatttataccaactagacccaccaacggcactaatctgtgatttattgatgctctctatatatggataatttaaatttttcaaaatttgatataattcagattctacactcttttggaaagtataacctggatctaggcgtttatataaccatgtgaaaatgattatgaatcccttttgtgttggttgtcttagagattttagtgatattggatgattcgtttgaacctcaaatttattctttaagagataatccaaaatctcttgttgaatagcattttgaaagtttttatctcttaatggtctaagatctttcctgagtaaactgatattatttttgtcatagctatttatcattgatagattataacttgattgcaaagaccgcctactttctctcatgttatgatcattatatttcattactgtgttggacattgtactaccgatagtagaatttctacggtattgtggattagtagtactaacaatagacttagattttttttttctaggttctgcctgagctgaaagcaaaaacgatttattaatatcacttattgtagacccaacactatttcttcttcgcctagttccagcattattgtttacgttattgttattattattatggaatgcatagggagcatgctgtgaatcgtttgccggttgagaattggaaaaaaatggtgatggtatttgagacacaaaatgaccgttatctttattcaaattagtaattgaattggtactaaaacttctatttatatccctattaaatggattatttgcattactagtactattacttcttcgacgagtcccagacaacactggtatccctgattgtgacatatcctaacttgttgagttatattctaatctttatttattagttttggttctctatctatatgttatcgtacttttaagtatgcaatattaatgaaaaagaaagggaagagggagctcaggactgaagaaaccacttcttgcgcacttctctcttatcgttatttgtatataattttttttagatccttttgtatctttgttttgttttttatctcaaatctttaagatcgaagaaaaaattaaaaacataatggcggaaaaatatgaaagctggaggtcatagaagagttgaatccaagaggctaaactgaacaactgtatgagaaataagtaaacatgtttgtcaggtatgcgatgtgttttgtttttgtttttattttaatacttgtatttaacaaatttaaagacagtgcatagtattacacttttgagagtttatagggactgggttgacataaattcagaaataacattgaaaagaagagaatattcttcaggaatactaaatatgagagtgtttcatacggttaaagacattgttcagtggcgtgaaactgaaattggtgaccggtgccaaaaaagaattgggtttgtacctacaatgggggcattgcatgaagggcactcatccttaatacgtgaatctgttagacaaaatgatatcactgtatgtagcatcttcgtcaatccttcccaatttgcaccaaacgaggatttggacaaatatccacgtacattaaatgaagatattaagttattagaattattaaattgtgatgtcctatttgctcctaatgcttctgagatgtacccacaaggaatcccgttaactgttgaagatcaacgtggtccgtttgttagtgttcttggtatcagtgaaatgttagaaggaaagactagaccaaatttttttcggggggtagctactgtggtaacaaaattactgaatattgtttcacccaatgccgcttattttggtcaaaaggatattcaacaatttatagtgcttgataccatgtgtaaagaattgtttgttaataccaagttagtaatgatgccaatagcacgttcccctactggtttggctttgagtagtagaaacaaatacttaagcgacgaatcaaaggaaatatcagccaacatttacaaaggtttagaagcagcatctaaattgattcaagattgtagatctaagcataattgttctaaggaatgtgggaattttagtcgtaccattgtggaagaaagtgtaatgaagcactggaacccctttattgaatcgaaagattttaaagtagattatttatctattgcatatcgttccactttaatggaagttaccgatcctaaggatttctgtaatgctgatgttccattggttataagttgtgctgtgtatgtacaggatagaaaaaaccctaatgttatcgtcagattaattgataacgttcttgtttagtagttggtagcagatagaagtatcttttatagatacctgccaattatacatagaatttatatgcaggtatacgtacacatgtacgtatctgtgtatatatagactgattaattatatatagtctattaacgttgactaagttacttcctttcttctaatgatttacaataattcacttgtgaattctactgtgctccccttttttctaatatgcaggattttgaatagtttgttcaagaattatatagttatatttatacataattttctttactttctataaatggttacatatatcattcttttgataaacttaaattcgaactttatccattgtaaatgcatattatataagattgtgtattctataaacaatttggacacttagtcggaaatttcccaaaggtgtaagggaaggttagtggaaatttatatagcagctaaaatactatgtctaattcagatagactaaaacataaagcaaaactgcaaagctcagtttcatcagcagtgttggaacagccagcagatctatctacaccagcatctcttcgatcatcacttcttatctcttcatctttttctctttcaccaacacatgaatctggttttaacgttgtttcaaattcagaagataacaatcataacactaaccagagggaatcaatctctaatgctgatgtattagatccgaatttgtcctttctatattatttggagacagctgaacaaataaaagatcaagacgaatttgttgagcgacaaacatcctctcatttgggtgagttaaatactagtgtgtctgcactaaaatatttaaatgataatacccctatatcagattcttggcacaacgtagagaagaatgaactatttgaagataaggtcaaatttaatttcaatccaggtcattacaaaaataataatagtaataataatgataatgtgggcattttgtcttctactgatacatcctctgaagaagaatcacaacgcgaattatctattccttcattgttgacagtctctaatttaaatgaggaaagggttttttcacacatagtttcacatcaagaaattagcttctccgcagcgagtctgcctcacccaacaaatgtggtaaatataagtgataacaacattcaagacatcattattgatgaagatttaaatttaaataatattgttacaaaaagtttgagttcaagttcaaattcttttataatgccaaaattatcatttaagaataaaacaagttcattaacattaaaatttaacaaacgatatgataaaaaacactatattcttatctcaggtagacacggtttacatttttttaagtctattcccatggaatatcaacaatttttccaattaccaactagtcacgatccaaaggattttgaacagtattatggactcataattattgtgaaagagttgagagaattaatcacgttactaaatagagtctcaaaacttgatggtggcggtccacctttaatagttctgtatcataatgatcaaagagtacaagttaagaatatcatcaagtcatttctaaggaaacaattgatttcattatattatccacctattgatatcaataatgaaaaagaattgaataacttatttcatgtgattaagctgtcattatctaatgaaaaacaaacagagataaatttaggggaaatgcagtcacttaatgagcaagattcatatgatttatccctatcaagtgcattgtcatcatcttttgaaagtcaggataattttaataatggattaaagaaaagaaggaaacggaagagacaaggacctgaggaaataactagaagagctaatatatctaagaaagaaaaaagctgtagtataaataataatattagtaaaaaaggtataaaaaatgaacgaaaacaatggtttaattatatctccactaaatggattatttggggaatatcaatttcagccggtattagtgcagcatattatattaaacatagttataatattaataaagacacgtttccatttatcagagttattttagatgcagaattttttaagaagttaaagaaaacttcattaacaaaaattgttggttcactattcccgaccgccaaaccacagagtatggaacaacaggaataccctattacatcaacatcagttagtaatactaattctacaagcattagggacacattgaagcctgtgttaaactactgttttaatttcataaagtatccattaataaaagtaaacaattttattagaaacactattgtagccacaaaaaaatgttataatgttcctttagaaaaatttagtaagatcgataattggaatgttgacgattctaacaattttattacattaagttatattaccatttagtacctattcatttttgtttttgaaattaccattattattagtggtggaattattaaaatacgaataattgatttattagttatttacactgatatcacaactatcaataattattaatttacaggttggcatatacaactatttaacttttttatttatatgttcttaaaaggtgaaaacaagaactgtctcctatttattttacattttttatctttttaataaaatctctttttcttagcggtgatataaatacaaatatgttatatattcttaccatagattatttatagttaagtagttcatctattaacaagttttttttaaaaaaaattatttgggactagttatatcgtagcaaatatttaattagattatttttgattataaattttctaactaaattatttgtgtatatcattacttctcacattaatcctatttttctcaaactgcttacatatcctatttaaatttttatgataatgctgagttgcactgtctagctgttttttaattcattctctgtttttctggctttcttggtgtagtttatactataaaaataaataaagaaaataaaataaaaataacacgattaaaaaaatggatatcgatgagatatagaagtgtcattgcagaatagcaggaatatacataaaaaaagtacaaatacacatatatgtatacacacatatatacatatatatataaatagagggagagagataaaagattttattagcgttagttacttacaacgtagtgtggctgtaaagaaaagagtagtattttcagtcggatggtattagattgtatatgttccaaattattgttttaatatgacaaatttgcgtaaatttcctccaagaccaccttatagagttagtctgagggctcaattgactgtcctagtaagtattgttgctatagtctcgttggtaattttggctattacaacaggtgtttactttacagacaatttcaagaatttagaatcggatcgtctttacatagcagctcaactaaaatcctctcaaattgatcaaaatttaaattatctatattatcaatgttactatgtggcgtcaagagatacactacaaacaagtttgacaaattatgtagctggtaacaatacagaagctaactgggtggatacacaaagtattctagaaaaatttttaagttcctcagatcttttttcagtagtaagaatatatgatgcattatttaataatgttttaaatgccacaaataatggaaccggagatttaattccacagtctgtattgaataaactgctacctttgtctatggataatccattaccatcttctttagaaactacagggattttgacagatccagttaagaacgggacatcatacttgatgtcaatgtcattacccatctttgcaaatccatctattattttatcagattctagggtatacggttatattactattgtaatgagtgcaaatggattattatctgtattaaatgacacaacagcactagcaaaatctaatgtcgctattgtttctgcaaaatataccaattactctatgttagattcatacaaatttgtgtttcctccgtatggtgctcctaccagcatcataaattctacatttttactagttaatgggtcattcttgagtgatgccctaaaactaggtaaagggggtagtttgaaatctacttttttcttttaccattcaaaagttgcagtaggctattccccttgtacatctactctaactaattgggtagcagtggttactcaagtggaatccgtgtttttgtcaccatcaacacgactggcccgtattattgctggaacagtggtagctattggtgtttttgttatgtttatgacgttccccttagcttattgggctgttaagcccatcgttcgactacaaaaagccacagaattgattacagaggggcgagggttacgacctacaacaccaagttccatgagtagaacaagttccataaagcaagatagagcttttgttcgcccgctcgctccagtaacacctttaattgatttaatatgtccaagcagtgctaatgaacataataatagtaatattagtaatagtaatggtcatgatgttactgatagttcatatagcaacaataacactggcgaaaagcatgaactggattctttgtcatcatcgatggtattaaagtctaaacctaatccatctctaaataatcatgatacacatagtaatatgtcttgtgacaattacaaaattaaaaatccgccaaatcctgaattattaacgccgcctaaattatcaagggtagaagaaggtaatgatgacgaaataacatatgcaagccgttctagaggctatattgctccaactaatttggtagaagccagagtacctcaatatagaagattattttcagacgaattatctgtattaaccgaaactttcaacacaatgacagatgcactagatgaacattatgcattattagaggagagagttcgtgcacgtacaaagcaattagaggctgctaaaatcgaggcagaagctgccaatgaagccaaaacagtttttattgccaatatttctcacgaattaagaacaccactaagtggtattttaggtatgacaacaatatcgatggaggaaacagatattcataaaattagaaataacttaaaattaatattccgatctggtgaattattattgcatattttaacagaattattaaccttttctaaaaacgttttacaaagaacaaaattagagaaaagaaatttttgtattactgatgtggcattacagataaaatcaatttttgggaaagtggcaaaagatcaacgagttaagctttctatcatcttatatccaaatgttattagaacattggtactatttggagattctaatcgtattattcaaattgtgatgaatctagtctctaatgcattgaaatttacccctgtagacggtaatgttgatgtttctatgaaagttttgggtgaatacgatcaaattttaagtgaacagtgtaatcataagaaaatttatgttaaaaaggggacagaagtagttgatgaaccttctagtataaatctagaaaatatcaaagatgcatctgatatgtcattagcaaatgacacactgtctttagtgtctacatcatccagttcctatgatgatgctctgttcagtaatcaatttaaaaatgagaaaaagaacgatatagatgattctgattcggatgatggacttggggtaccactagacaaggagaagacgtgggttattgagattgaagtgaaggatacaggtcctggtattgataaatcattgcaagaagctgtctttgaaccttttgttcaaggtgatcagactttgtcaagacaatacggtggtacaggtttaggattatcaatttgtagacaactggcaactatgatgaatggtaccatggaattagaaagtgaacttggcgtgggtagtcgttttatcttcacagttccattaacacaaaggcgtgtaattaattatgatatgtctaagaattcattcgaggatgaatttaacccagatagtaaaaaaaatcgtaaaattaaatttaaagtgcataaagataagaatcatagtagaacatcagacaatgatgataagggagaagatacccataaaagtgaaagtagtacagaatcatcagcagaaggtgatgatgctacagaaagtattctatcttatgctaaggagacagcaagtaccgagaaaaacagatgtaaggttaatttggatagacctttcttgcaaagtacaggtactgcacgtaatattttacaatacagcatggactcatcaaaagataaaacaatttacaatgagaagacaattactgataatgataaaaaggacattagaactaataatggtactcatatcgatacgactgacttaaagaagaagaagaatgatactgaagaatttacaactgatgataataagagaactcctggtatcaaaattctggtagcagaagataatcatgttaatcaagaagttataaaaagaatgttgcagttagaaggaattaaagatatagatttagcatgcgatggtcaagatgcctttaataaagtctctgctctacaagctgatggtcgacattattcaataatttttatggatgtgcaaatgccacatgtagacggattacttgctactagaatgataagaaatgatttgtcttatagctacccaattgttgcattaacagcctttgcagatgatagtaatattaaagaatgtcttgaggctggtatgaatgggtttttatccaaacctatcaaaagaactaaattaaaaacaatcattaaagagttttctaacgaataaattagaaacttttaaggaagcatatatatatatatatatataaacataagttgtgataacattaaaatacaaattgtagcatttatattccatttaataaacacagatattcattatttgactttgcatatggtctatttcttttgtatttaaatgagttcgcagtatatatagaagaaaaaataagaataaagggtaaaaaaacaaaacaaaacaataacagtagcaacatggatgtaggagcttcattaataccttccatgacattagtgttcattatggtatataggtataatttaaataagttggtagctagatttatgatacctttaattctatattatgtggtgtactgaggttatttcggtaaaaataaaccattcattactcaagagaaaactgaaaagaaactaaataatttgaaacgctgagaggtaacgaacaactatcgagtgtgaaagtaacgtattttattcctctattataattagataaatctatatattattatcattgtaatttgtcaaatattgagattgaaaagaattctaggaaataaggaaacaagttgagaatatagcaaattattatgaagaccgataatctatcaatagaaggtgagtgtcttcataccaataaccaacagctaatcgatcaaatacgatcgcttacagatgaattgtacgggaagttgaaggaaattcaagaattaaagtatacaattacagaacaaaaagtctcttttatgaatgaaatgaataaaaataatgaaattgtcaacttattgaaggagagaataaatcacctacaagagtcaggtttaatgtatgacaaaaaagaaggtgatattcttttacatgagaaaaacagtaatatatacgatgaaccagaatatataaaaatgaatcatgaactcaggttgcaagtcgaagaactagtagaaaagttaaggaatgaattgccgcatgttcaaaatttagaaactactaataaaaacattgaagcaagattaatctcaaatattgatttattggattcagtgtctaacgaaaaccaaacattagttacagaaaatatgaggttatctcaaaaatttcaaagtgcgtctcaaatgattaaagaattagtatctcaaaaaagagacttgtgccaacaaattcagactttattgtacacagataaaaaggatagtagtaattatgaaagtaataataatgttgaatattctaactctcaagatgtaatatcttctcaactggtatcgtttactaatattgaagagttacaacaacaaaatttaaggttaataacagctatgcgtaatctaactgaaaagtttgagaataattctgaagaaaattccaaggatgacggtgagaaaaagaaattgaaaagtgaaatctataatttacgtaataaaatccaagtgttattgacagaaaacgactctttcaaactactaatggatggcaataagttgattacacaacatcgcgaaaatgagtataaaatgaaagagctgaatgatcaattaattttacaagaaaacaactacaaacaaaggattgcagatataacagaaactttgaatgaaaaagaaattaccttgagcaaaaataataataaattaaattatcttttaaaggaaaaggaaattttgtcaaatgagttgaaagaattaaagaagataaatgagcaacttagagaagaacataggcacatgaaggatctatgtaatggatttgaagatgacctagtgggactaagaagtgatttattgtcatataagacccagtgtcaacaaaatagtaacacagtagattgtttggatgatgaagtaacaaggttacaaaaggacaaggaactattagaaaaagagatccgcttatatcaacaagaaaagcatgattttgaagtcaagttattaagcattaggaaagaatcaccatcaaacgaaagtgtaattattgaaagattaaagaaaaagttagaagaaaaagaaaaaatttttgttgaaaaattacaagaatataagaatctttattgtcaaaaagaaaaaaattgggaaactactatagaaatattgaataagcagattatatggctacaagcacaaactccacttcagtctattcctttgagtgatcaagatatgaaaacaactccaaaaaatgaaatagaagatatatatactgaagatataggacaagttagcgactctcttgactttaacgaaaaagttaacagtgaagataacgggttaaataaagaaattgggcatgatgcaaatattactattattaaattgcaacaggaaaaaaatttatatgagaacaagataactgctttgaatcttgaagttagcttactaaagagtcaacttgaattgtattgtaaagaggaaaatttgagtgttattaaaaagtctaatgatgttgaccagctaacagatgataaatttataaatattatgagtgagttaaaggaattagatctgatgaagaatacgataaagagtttaaaggaagaattggatcaaataactggggaaaaagcagagttagaaactgaaaaccagagattaaatcaaacaaatcaatctagtacatcggaattacagaaatataagagtgaattgttggtggctacaaagaatgttgcgcttcataaagaggaatcaaatagatggaaaaatatggcagaacaattgaaaaattctgaacagattcaaacactgtctgatgaattggcaaaatataaagcagaacttgaggctaaaactaaggaaaatattgaattagaggataaatttaatagattaaagagacaagcacatgaaaaattaaatgcttcaaaggtcgcatccgctcaattgtcttcggaagtagacgaattgactactaaacaagcagaattgcagcttataattgcaagatataaagaaatggaaatagagtataacggtaagcagcatgaatttactgagttacagacacaacttaatgaaactactgaaaggttaaaaatatcagagttgaaattacaagagaatcatagagcgtatactaatttggagcaaaaattaaaagatatgcagcaggaatacgaacataaagagaaagaagctatagaaaaagttactgcagagttgaaatctaagtatgaaaatgcaactaatgagaataacatttcatcagttaatcttaaaaaaatgagagatgaatgggagagagaaactcaagttagaatagaacaggcaaaagaaggcctaaagaagcatattcgactaccaactgaagaaaagattaaaaagataatagaaaaaagaaaaagtcagttggaaaatgaatttgatcaaagagttgaagagaaagctagagtgttaaagctctcggatgaattaaagaagccagttgaagatatcgttaaagagttagaacaaaagatcaaggaacggatagaagaagattttaacagtaatttaaagaagaaggcttttgaagaaggcaagcatcaagcatcaatgcgaaccactctattagaaagaaaaatatcgaaacttgaagcacaattagaaggaaaacaaccccctgacaataaagtatcattagggtcacaacaacgtaaatctatatcagggttgtccaaaattgacattaataaaccatttcaactggcaagtccaaaattggatctagcttctaagtctttatcaactctcagtgcagtgggcagtcctttcggtttcgagaaaagtccaaaaaatcctttttctttaacgacttcatcttttaaacaaactacgggcgataataataataataataataataataataataataataataataataataataataataataataataataataataataataataataataataataataataataatagtatattttcttttgtatccacaaaacaatctccctttggaaaatttgggaaatcagaatttaaaactcctatgaatatgttattggattcggaacaaccagttgaatcatcagatgatacagagagcaagaaaaaaccactcgaggacaaattggatgatcttccattaaaaaagttaaaacctttagagtaaatggagtatacattttgtgcttttcaatcttaattgaagatccctggttttatcaaaagagttctctcgaaaatatagcaagtaattgtcatatgaagtaatattatttcataattggaataataaatgataacagaaagttcatttagataattattaatcttgcatgaaaaatttatatgcctatatattaaaatattttgcatttaataatatacttagctcctgtggagaactaaggaaaccatacaaaatatcttcattaatcatataagaaaatcatattttttgttgatattttcgaattaaaaaataacaggatattgatattgaaaaattccactttttttattgatagttgtgtaaatagatatttttataaagggtgttttttttatttcttatcttatgtatactttttggagggattattgagagtgtaaaatttgaagaagttctggaggttaccaaagtaagtttcaaaaaggttgatatgtgaagtatccagccattaaaacactacgtgctttacataaaaatgcatatagcattaaaggaaaaaaattttgtctatatataaattgaagtaaaggatataaaacttttaaattgtgaactcagcttgtgagagtatttgaaagattgttaaattatcattagtaacaaattactatgaagtttatttgacagtttactgatagatggaaaagtacaaaaagtagttatcagtatgtgttgagaatgagcgcctttattcattggatatatagtaaacaatctcaatattatattaaacagatttagtacacaaaattataataaagttcttcactttctttctctatatacaacatagaaataataatatacaaagattgtaaataagataaaaataatgtatgatgaaatccttggctttatatatgttaacattaagccattttcctctacgaacagtaagatatttaataaacaaactcaacaacttttggtgacctctcaacaattattactcaacaatttatcgtttagtgtctgctaaaatcttattgttctatctattttattatagaacattctatttcaacagtatgaattgttgtattatatttaccaggttgtatctaaaagatatcagtaataacaagactagaaaatagggattatagtacttttttgtaaatgtctgcgtgtaattagtatctcttttcatattctttttctttttttgaatatatattttatatttagcctgagctatctcaatttactttgaataaaatgtatttcaaaatcctaaaagtcaatacaaaaaatttggaatctagcctcaaattaaaacaatgatgtttctggatgggaggaggagacgatgcttattttattaaatgacttaaaaactcaattttaaaatattactttgtacttcaacataaagttctatatgatatcttttacttttttgggtaaaataggacagggtttgaaccaaataacttctctatcttattgctttctttccaaaaatagtataagaaataaaacttaaagacaaaagtttcaaaattattatgattaaccaacatgtataaaatattaactttgaagaaagaaagtttttgcaagttaagataggaatctttaacataaattacacatttcaatttactatgtacatcttactatcaatatacaataaaagaataaaatataatagacttggaaaaacacaactgcattctttgcaagacttgagttcttcaatggaggtttaaacagagtaaataataattttgcatatttttcactgcttctattgtttacaataaatttaacttcatatattttttaaagttctgaattgaacaaaaaaatccccacagtaatgctaataaccatgattttggaggctgcaggacactaatatgattcagttagaactcatacatgtaaaaacctttagtgtagatgaggagttacaaacattcgtaaaaataagaagtcccaaataatgtcataattaaattatttgtgattataaatagataatagtaatatattgatggacaatactcttcttgaaattctaaatgagataaaatattttatggtaaagaataaactgtatagtgaaccagtttttaggataatgctactgctttatttaatattgcaaagttatatcctcaaacgaataattggcaatgttctgaacaaatcaaagtagaattagatgttttaaaataaagtataattgttttttaaatattcttaatatccacaataacttgataatttaaaagttccagtaatagaaatatattcactacttattaaacgtttttataacatatgctaatcagtagtatgaaactgtacgtgaactaaactaactcatattttgtgtaaaacaaacaaaccaaacagaaaacaaatctatcccaacaattcaaaataatttcaccttcaatatttttagcaatattacaacaatctgttgtgttacttattaaagtacttagtttctaacttatattgcttaactttcatttaaaaaaaatcgatatgcaattatgaaaataaatatatataatatgcaaaattttgattttatcttctcaatttagctatttacataaataattcccaagaagaaatgtcacagtatgttcagagcttaacatatatgagaacgtaagcctttggcaaaaataatttgatcaaaagaacccatcttcttcatgattctaatcacgcaaccattttcataacgtcaattatcttatacacatatatacgacatcaacatattgaaatcttctttgaacttagtatttaacaaccgtagaaattttcaattttatatcttatatatatacatgctagtaatagttgtagaaatacaaaaaacaatattcaacatgactgagaacatcaaaatactgatgattccacagcttttttcttatacaagtatcaaaataactacagattgctaaatactcacaccccctttctatacatgtacgtatggttatatctgaatatattactatatatattttcacttactgtcaatgaatttttataattccttttcgaaattctgaagaaagcttaaaattcatggtttgattaaaataaaaaaacagcctcgagagttggatataaatagaaaaaagtggaatatctatagagataatcatccattatgaagaagtaatttatccatcagttttctatggagccaactgactcgtcaaaactatcccatcaaagactctctgtttcactgcgatgaatctcgatccacgtgatattataactgctgatccatatgctaacttgacatcagatgaagatgaacaaattcaaattgaaaaggaaatacaagaaatggagagaaagaaacaagaccttctaaaaagactagaacaaaaaaagttaattcaaagagggtagatcctaactttgtatctgttgaagttccgaaaactccagaaaagaagaaatccacagatgataagtttcctaatcatgatattaatatgacaacttttaaagtaaatttacaagattctaaagccgcattcaacaatagggaagataatctaaatgaaataaaattgaaagaaaaatatacaagtaaaaatgtatctaatctttctgaatccactacatcttattttgtgaataggttccaagaatcgaaaaagagagaaaaatcaagaataaaggcacatgagagtatgatgagctctagaattcatacatttggtaataacagtaattctaaggaatacaagcatatttcagtaaatgaactagaggaatattccaatttatggataagcaaaagatatatacctgaacctcaattaaaagagactttacaaaatattaaaatattaagattgaataaactatttgcaaaagtacgcccacctaaatttgaagaaccacaatattctaattgggtaacactagggataatatctcaaaagagtgaagtcaaatacaccacaagtgctaaaccgcaaaaatttattaagttaactttaacaaaccttaaacagcagattgatatattcatctttggagattctggtgttcagaaatatattacacttcgagtaggggatattattgcaattttaaatcctgaaattttaccttggaaactatcttcaacatcaagaggtcagcatcttattaaatcatttaatttaaaaatagcacataattataattgtattttggagattggcaaaagtagagatcttgggtattgtcctgtatggaataaatcaagtaacagtaaatgtggaaattgcattgatgtatctgttgaaaaatgttgtgaatatcatcgtgaagttcaaatgaggtcatcaaatgcaaaacgtcttgatttaaatggtggtttttctatgggagctccaacaaaagtcggccttcaaccaagtatttatcgtgaaaatgtttcaaagcaaaatccttcaaatagcaagcggatactatcaaataatgttcaaactgaaaatattagtggcaaaaattttactccaaaaaactatggtaatggttccaatgccccatcatttaatttaatgtcacggactgttggatataatcatcaaaatgaggaagaattgaggaaaaaagcataactgcaagacactttagtagtggtaatgcagcaaaggcattctttgacgatgattaccataatcctgatgcatttaaaaaaaatttaaagaatgataaaaaaagaaagattgatgagatcacacaatccaaaaaatttgataagatgttaaaaaaaatatttaataaagaacttgatcttgatgaaagaagttcaattgagattgatcaactaaaaaatactacagagtctattttacaaagtggaataatccagaatataggatttgatccaactcacggtaaaattgcatctgtattgcaaaataagaaatttacatctcttccaataaaaaatgaggattttaatagcaatgatttatccaattttaaaagctcagatccacattataattctaagaatgataagaaaaatgtagttaaagaacttttatcatttaaaaaggaatcagttaatcttacatcttctgcagttcatatgatgcaaagaaaagaacatcgaaaagcggcgtgggtagaagtatttggtactaaaaaggataaacagaaatcaagagaaaatgatatagaatcggacagtgatttagaaataatttaatagactagtctggatatatatatatatatacgttattattggaatacttaatagcacttatgtattgtcttatctattgccagttaaaatttgattgatgtcttgaattaatttccatctatttttggattaacttccatgagagacaccaataagtgttattggacaattttatcgctgatttagccaagattgctaattgtaaatgttgagtttgctgattgatagaattataatttatggacatattcttatttatatgtaagacatatttactcatattatgttttgatgtataaggtataattaataattcatgattagataatctttccattgatttaactcttagtaatgtatcatattgttgctttaattttgttacttgtattttacaatctatattggagagagattgtttcaattgagtgactaaaggtgtatgatatttgtcagttaaatgatctttaaattgagataacgtatgggaatgtcgtagtcttcctttatacccggtctgccacttcacattaacattaacattaaaatttcgtaacttagcaacatttgtaatagataatctttgtttcttagatatagatttaggtaattgattaaaaagttgaccataatttttaccttgtcctctagattgtttactaatttgaaaaaaatttgctatattttgatctttttgtttaaacacattatcagattgatttgtgatactccatatatcagatatcttagtagaatatttgtttttttgctgtttctgttctattcgtttgtaaaccttgtttgatttatcgttataaattttaagcgggaaggttcgcaccatcacataagacaacttccctgataaaactgtttcaccttaatgtatgtccaagtaatgtgtacgtggtttttttactgtacttaaagaaagaaagagaaagaaagaggtgtttaatagcacgatactcttatctttcttttttacacactgtacaattaacagataaatatatatatatatttacaattttttttatagctaaaatcacattccctcccacataaagatgatcttctccattcattatataagcttagacatagaaacatacatacatacatacatatatgtaccactagtactactatcattactactaagatctacagtacatatcgtctaaaaatcataccaaaatagagaagtcatatattatttataaaaaacttctatcatttctttaaagaatttttctgttgattcatcggtaaaatatttttaacatttcttatactcggaggccccatgatccctgaacctttcctcgaacatagatttgtaagtgctcttgttgaattcgatactgagttaccggatgaaagttgtggtctgatggtagtggatatattagtggatgaagacgataataatgatgtatctctcagcctggttaatggatcgttagctcctacatgaacatttctaaacattgatgaagaagatatcgtactgttgtatatattattcacatgatactgatcaaatgacctattggaagcagtcggtacagatgtaaaaaattcgcgatcattatttgtaattgtatttgtgttagggttagcctcaactaaaggtagatcttttcctgttatttgatctttccaggggaaaaacccatcaccgaaccaaaaatgttgtactacagggaatttattcaatacttcatcatcgtacatttttaacaaccctcgttgaatcttttgccatgatctaacagtatgcaaaatatcaaacagtatcggagagtgttctttgaagggacctgttttgacttggcatatgaaacttataccttgagcgaaaaaattctggtccttgtaaaacccatattgttgatcaactaataaatctcttggcaaaaggaaacaattatgaggattagaccattgagatgcaccccatatgtacgctagatggaaatggtcatctagaccccataccccatgagaaccagccggttccaaattatatacaaggatcaacgatttaatcagatggtaatatttgtaccaaatgaacatcaaatcatctgcaaagtttgtcagtttgtcatttccctttgaatttggagctgtagagacatctatgtcaccccatagttgcaacatatccaatgaagcgataaatgctagaaaggagagttcatgaccagtaccataatccaatctgacctttgacccgaaagaattttcaatatagtattgcaattcatcaatcagatgttcatttttaccatcttgatatcgggtggataaatcaacaagaatctctctgatcaacaatctaatgacttcgtgttttttatcgtgccataatctatcagccatgttaccaaaccgtcttggacccttcaggggtggagtagacaaaaacaaactgtatagggtgtctaaaagatggacaaccctatgtgtggtcttataatgtggcacatatccatcgatgtttggaattggtcttccagtcatcagctggacatatttcttcaaatagtgtcttattctctggatagccacggatcgttgaaaatagagcagtgattgtgaatcaaatattcttttttgtggtttgctgaagaatacgtttagcacatcttgttggtgttgttgttgttctaacattagtacgggaaaacgaagaccgactggacaagaaatatatttctgtacaatatattaacgtttatgactgaaactagttacccattaccattattatcacagtcaacaacgaatgacaaacaacaaataaacatgtcttcacctcataacgacagtctctgtctgagactcaatagtcattatttatatttcattgtcattttaaattgtgactggtagattttctttttttctcttcatgtatctacatttcacgggcgctaccacaacgaaaatcccaaaaaaaagaaagaaacaattttttttttgtttttcttattttcatttgagggagggggggatgaaaaattgtgggatacgtcaaatgattataatatattatattatgatttaatacaatatatccaatcgataactgttcagcaaacttaccgacgtattgaacagaatatatcaagaacacacagatacacatagacatatagacatagacatacacacacacacatatatatatatagatatatatccctgcatatccacaagaacttataatctttgtgtcaatcttttcttagtttatttgattacgttctatctttttctctcccccttccttttgctttgattttttgctttcgctttgatttgatttattttcaatggatcgacatagacctattttattaacttctccagaaggaactaattccatcattaacaactccacatctctatctgtcgaagattctcataataatcacaactcattacacgatgatcctccatcacctcagagtacagatttgcattacttggataccccattaaataatcacaattcatcaccgggtgtccaatttgatgctgaacagttgcagcgtggtagaagtagaatcaaaaaaagaaacgacaatgtgtccaggagtagagacctcgtagatacaaacggtaatccagtaaatattgcttcttcttctttgcatgttgctggaatcaacaatgctaatagcagtcagtcaagccatcgtggttcaagaagtgggtcacgttccttctccaggtctagatctaggtctaggtctcgtaccgcttcaaggatcagggatgaggagtttttgaaatggactgttttgagacaggatccttcaatgagattacataactataaaattaagtatagtaatagtggtaagagtgcaagtagtaagaagaaaaaaaataaaaataataacgagaacgaggatgaggacaaggaagaagatacagatgaagaggaagcttttgaggataccgaagacagtgaagatacaggtgatgacacagaagatgaagaggaagacgaggaagaagaagaagaagatgatgatgatacggatgaagaagaatctgacgaagaacaagtcagtgatattgagaatgataattcaattaacgagcaatttaattatgatttaggtacaaaagtgttaccaaacttttgtagtagcatcaatgatgtactagagagtagtaagccatggattgataaatatgaaactgaaaatcctagtaacaatgatccaaatattaatatctcttctttagaaggaggatatcttagaggtatacttactttgaataaaagaggaccccttaattcaaacaataatgctacaacaacagcaacaacaacaacagcagaagcaaaaacaactaattacaataccgaaactatagaaaacgaaaatataaatgaagatagttatatattgtatgttgatttaactagtgaatccatatatgccataacatatgttatgggcacattagtgaaaaatggtgatacggtatacatagttcattggcattcggatggtagagatgattttgttaagaaagaaagtatagtcaacaatatcatcaaattaagaaaccatgtattgcatttatttgattgcattagtgccacagtagacaatttggatgtgataatattgtctttaacacatccttacccaaagcatctcttaaacgagatgattaatgggttgcaacctttggcactttgttgttctctatcaatgacattgagtggcctgcaaaattttatctgtagtgtgccaacttttataattagaaagaaattgaaaagaactaagaagaaaggtatctttgattagacaaaacaaagtaatctatcaaaaccaatatatacatatcattgtttgttaatctctcccgtcctctcccccttttcctccatttaatgaatcaaccaaccaaccaactaatatatacatgccatactttatactacctacacatatacatacacacactctatatatatatatatatatatatatatattgtaataatgtattaacgttcgatcatctctacagaaacttgtactacaacatccgcacaccacataaccaatacttccaatattcgaaataaaataaagctgaaactgaaataagaattttatgaaagagaaggaaccctcccctttccctttaaaacgccagcttgttaacagaagtggttataatatcgttttcagcggaggtttgatgcatataaaaacagctaaatatacaattaaatttgcctcactattattggttattgattattgctcattgttattattgttgttgtgattgttgcgcttattagtaactgttagctgtagtactcttttgcgcaatcatacagttctctgttgtcaagacagagacatctaattgacctgaacattggaaaaaaaagtttagggtgcccatctttttacttgtcaaactcacatcatgacatttatcgtatcactaagcagacataaacttttgactactcttgggataggagcaattaccacagtcacttggtataaaacaagaagtgaatggtctccacatatagtacctacaaattttaccaactataatccacagaatcaaaatgtctcacaatccatccacaaactaccgtctagagaagaactcttacacaagttaacagacaaatctactgtatttgacgtactaatcattggtggtggatctgctggtacaggctgtgcactggatgctcagagtagaggacttaatgtcgcactggtggaacaaaacgattttgcaagtggcacgtcctcaaaatctactaaactagctcatggtggtgtcagatacttagagaaagcttttactgagttctccaaagatcaactgaatttagtcattgaagctttaaatgaaagagctcatcttttaaacaccgctcctcacctctcaaaagtgttgccaatcattatccctatatacaactattggcaaataccttactattatctaggttgcaaattttatgatctttttgcaggcaatcaaaatcttagaaaatccttcgctttatctaaaaatcaaatgaatcacatagcccccatgctagaccaaactaacttgaaattaggtcttgtttatcatgatggaatattcaatgactctagattttgcttatctttggctatgactgcaattagctatggtgcaactgtgatgaattatatccaagtggttcaattactaaaggactccactactggtaaactacttggtgcaaaattgaaagatagagaaacaggtcagatatttaccgttaaagctaagactattgttaacgctactggtcccttcagtgatgcaattctacaaatggataataataaagatggtttccccgacaaaataaacactatttcagatgctactaataccgctattaatatactggatgaacaaccaacaatcgctgttagaaaccctaaaatggtagttccttcagcaggtgttcatataatattaccatcctattattgtcccaagaatatggggctattagatgcaagcactgaagatggtagagtcatgtttttcttaccatggatgggtaaagttattgcaggtaccacagacataccattaaaacaagtcccaagtgatcctactccgacagaatcggatatccaagatattttgaaagaattacagcactatattaagtttcctgtaaaaagaggagatgttttaagtgcctgggctggcattagaccattagttaaggatccaagattgagcactgatcaagctgatatcccaagccgtaaagaggccactcaaggcctagtcagatcacattttttatttacctcccctagtgggttgatcacaattgctggtggcaaatggaccacttttagagaaatggcagaagagaccattgatgaggtaatcaaagtaggtgaatttaatacaattcaaaatttgcaaccatgtcatacaaagaatataaaattaattggatcacagaattgggatcttaattatgaggctttcttgcaacagacttaccatatttctccagtcatggctgaatatttatcaaataattatggtgaccactcaccgataatctgtgaattatttaaaaatgatccacagaataaattaccattgacaatggctggtagtactggatgtgatagcagtgcgtttgattatccatacacaataggtgaattgaaatattctatccataacgaatatacaaggactccattagatttcttagtaagaagaacaagattcacctttgtagatgctaacgaatcacttaaggctttagaaggtacaataaatatcatggctaaagagttaaattggggttcatcaatgaaaaatcgtgaatttgaaagagctaaaaatcacattcttacttttggcatttaaataaagggagtaacaaattattattattattttttttggtataaattcatgtatctggttctgttgacagtcccgaacctttattgtgcacacttattaccatggttgttactattcttatcaaagttttatttttaatattctcgtattgtattgtttatacgttttatgtattcttactggctacaagtattttttattttaagtaatcgcttcacatttaaagcatatatcattaaaataaattttgttctctttattaatatataaaatagcattataagtatgtaaaattaatatgcatgcagaaaaatgtaaaaggcataatccaatgttttatcagtatataattcatcttttttctaccccattctttcataaaataacacataaacatcattactggatattttagtaatgcctttcttcaaatcaccatgatttgtttcttctttgacaacttcatcatcgaaataataccatttttgttcatcggattcaagactatgattaacctctttattgactaatgacgtgtaatgccccgatatcagattacctgtatgattaaccagtccatataatttatattttactgttttaccatttttagttggaatcttcaatattaatggataagtgattattgtatcatttttcttagttaaatcataataaaaccttgacaaatgaatcaccaaagtttttggtaatgatataaaatttaaagttttcactgtgattaattttttagtcttccattgtttcatttcttcttttatctctttcatttcctccttttgtgccattttttccaacttcaaaaattctttttcttctttttttttatttccagcattgttatcattactattggtaatgggtttaccattatggttattgctatttgcagtactactattacctccaaggacactaaatggggataatgaacgacttatcttgtgtgatgattttaacgtatcacgtccattattagaattattgtggtgatcatggtggcgggaaaacctaaataatccacttttacgaaatgacgaagaagatgaagatgaggataaaggagaagataatagaagtgcatttttggatgaagaatttgattgctcctttatcagttgtttcgtgattttatttttctctaccattgttttataatcatttgttactttacaacaatgtggacattcccaagcattttcgcctgaaagaatttcatcacttgtatacatattcaagcaatcttccaatttgacccttttatttttagaaaaagtggaacctgaaggttttggaattgccaatgataacacataaaaagtagaataattaaatgatgaatgaccacatctttggcattgtagactatgctctatttgtccttggaaaatatcatcaatgggtgatagcccatttccaattacatttttgtcaaaccaccttttatagtcttttgtttctacgtttaattgattctcatcatataacattaaatttggatatgcattgacaacttcatcctgatttgataattcatcatgcaatttatctaatactagcattaagaactcagtagtatcctgttgatcatccggaatctttaaatctggtctgaaaatgttacaaatttttaaaaaggatatgggaactaccgaacaaccaccattcaaatacatttttttaaatagtagataaaatccatttgacaattgtggtaaattcgatttatttgactttaaaaactttttataaattgacgatatgaaaagatttctgaattcttttgtagcaaacaaacattgtatcatactattaatgtaacatgtattaccaagatttcttagcccagtaatagataatgaaacatagatatttggatttttttcaatagttggaatagtatatgtcctttgaataatgtttgtattatcagtagttatattatcagtatctttatatttattattattgattttaggaatttgtttattcttctgcaatgtataacgtttggccaatgttgttgatactaaaggaatattatctagttttttttctacttgcaataactgtctttcctggccataatatcctttatttaattgattatatggaacagtatatgtatcatttgatgtaatggacagtgcaggtgattgtgatggagacggtatagcagacgtataattatcaatagttcctccagagaagaaaggatattccctagatacaagagaactgtcaatttgtacccttggtggtatttttggtactacttctggagatttaggaactaaagtaggtggaggaggcggaggtctttttctaattcttattggaacttccaatggtttccattgattatctatagtaggtgggaaaggttgttttttaacagagtgtgtagtagattttttggtagaattactaattgcagaattatcagagacctgtgatctataaagataatctgatattttaatatcataattcttggaataagttgtaataacttttttccatttttcataaccacctaataaactagtgggtacacatttcaattttcttaattttgatgtaatcaacagatagaaaaaggtaaaatgataatcaaatttcaatttcataaaagttttcatgtcactataatatacgatataatcgaattgatctctcctttcaaacaaatctaagtttggaacatttcttgatttcaagattgtctctaatttctccatttcataaataggtaaattggttgtatgatcccatagaagatgtggatcgatatggaccaaagagcttgctaatatatggctatactgaaaccttgcatctgttctaagatctatcaataggatttttttgttataatttttatttgagattaatgagaagagttcaggtgctgtaatgatagattgcttttgtagccgatctaaggattgtataaaactattagattcatcataaaacttgctattctttgaagtttcatctgtgtccaacatataaaccgaatggtaagaattctttctatgagtcaaagatctatcggctgtaaatgaaagatctgtatttgtgtctgcgtttggcgagacgttataattatctgtataagtaggattaaatatagggggaccagtggaagaaagaggaacaaaggatgatagactttgatttcttttctttacaacattgtgaacattatatgtattatcaagaaaattttcttgtttcccagggaatgatgaaggtccttgaaaaggtataggtggaggcgaatgagatggaggagataacatgatagaattatctatctctttattaagttttagctcatagtcattagtatctttatcgaaatccgaggaagatataaaggctgctactttcaattgatcatttggctctaaatttggagctttccaaagataaggattttggtcttctgaatcttctgaatcagattccattgataagtttctaaggttattatttacagtttcagtacctctactggattcattatgacataaacctgtattagtagtgattgttgttgttgttgtcatcgtagtagtatcgttattattagaaggagtaacattgggtgaatgattattttgattgtacggtacagaatatgatcttttcctagaattagttatcaaattgttgcaataaggattattggcaatgctattgtctgttgttgataaagtaaaattattctctaaaatggtttcaacttcgtttttaaccattaaacacacgttagtcatgttcaattgagactcatataaagttttaacatctttatagatagtataagatttattttttgattggaattggatagactgtggcataattaagtagatatagaaacagcctattataaacgaatgtaaagcatcattttgagaagtagagcttatggtgttactattgttactatctgagtgatacaaaaatttcaaatacagctcgaacagatattcagtatgttctaataaatcaatcaatctttgtaatttcaattgtggataggaatgcaaaatgtcattattataaatttctcgtacccttttcaataatacatccgaatattctggtgtaaataaaacatgatgatcgttcaaatcaaaattgtctactattgacataactatttttttttttttttttttgtgaaataacagatatattggaagaatgaggatagtagcaactgcagtgggaaaatagaaaaggatgtatatagcgagatcaattgaccttagttgaaatgtaacaaaaaaaaaaaagagaaaataaataaataaataaaaaagagattaagagataacaatgtatatatggtactattcgtaggacgttttaaagtttttagagggtgccagtcaataattgctcgaagatcagaggatgttccatgcgataagtcatcgatttccgcctttccttcgctcatcccccccccccctcttcctattcctgtttctgtttctgttcaccattccctcgcacacaccaattgaaagatcttctaataaacgtagagagttgaatgaaaaacaaaacaaaaataaaaaaaaagaaacgcatcggaagtacatccatacacccgagatcttcttttttgtatcatgtggtagcgtctagaatattgaacacacaaaattgttcgatttgtcaagacacaggtgatctgtaggtaatatatgataaactttcaccctgtatggtaaaatggatgactaggtgtgatagagaatatattatgtaaaatatccacacttaaatacatatatataggaatataaatgcagataaaataaccatcttatcttctttcaaaatatttcgatgaacctagggtggctactaagtaatcataaaatgattcaccaacactgaaatatttggccaaatatcttttggctgttggatgccaatctccattatcctggttatgttttgttttattggatattattgtagattgctctagtctatttaaatcgaattgtaaacctgtgttgcgtctaatgcctgctagtaaagtggatactaaaaggaaatcaactccaatatgtattaattttccagtctagttataaatatcttattagtttaattaaaacataatctcatgccatatatgatattagattactctgttttttttttttgttttgtttatacatgttagtaattagagtccatatttagggcgttaagaaggagttaattcattgaacattacatactaaagccattgttaaggaatcctttatgtatatttatgtgcagaaatgatctcactattcttcactcaatcttcttttgcttctacttctacttctttctttctctctttctctctctctctctcacttcagtgatctccactctaacttaatttcatgatttctttgtaaaggagtaaccatgaaattttcagaatgaaaactccagaaggggaaaacatctgctaaactagaaatcaaaagaatattcagaatactagaatgtcaaaaaaaaagtttgtataataaaatatccccctgttagagagaaactacagaatatacatgtatataggtatatagaacagcaaacaataattataatccagccaataagtagcacccaattgaaaataaaataagaagaggattaaagttagtgtaatcatagaataacataacaccatattaaatatgctatcaatctcaaagaaatctttagtatctgttaactctaaaaatgttatgaagcatttgtcttataatagatcatactcctctttcattacaatatccaccaaaacttcctcatttccttttttgtccttataccctctaattaacaaatcggtaatatctaatactaggtacaactcaacatctaccccaccgacaataaaatatggtaagccattaagaatagatagagaattacctgatccaactaaagaacagagaaaactaatggccagttttattctttttggtggtatcatggtcactgcattagcagtcatcttcaattatgaaaagactgaaaatgctatcgtcactaacactttataccaattacgtagatctgagaaaattagagatttgatcggggagaatatagaatttgatggattaataccttgggtatatggtcagttgaacccaatggccggtaaggttaatattagattctatattaaggggaataagaataagtcaggtgagattaaattggttgcagatagatcaaataaggatcaagaatttttgattcatgaatggtccttaactgtagatggacaacgattcgatttattggaggaaaattcttctttcttatagaaaatatatataaatggctttatctgtacttctaccgtaccccccccccccccatcatttttcatttggtttgatcttttttttttattattttgattattctttgtaaataaataagtatacatatatatatatatgtatatgtatatatggctttttgtatgtcttcagtgtcttcatcaatgaaaaaatatctttcttctcaattttgacatctaattcattatttacctttttgaaagccctaatttgtgccaataatactattttttttttgtatccttccttatctgtgccagtattccaatgtctttttgatctttccttctctgatcatattcagtttttgttattattataataaataatgctaaacacataagtaatggttgtgattatatatatttattatctaattgaaaataaatttaaacatttttttctatatatctggatgcgtttaatattcttattttctttttcctgcttttaatactatatttgtggtagtgattttaaatcacttatcatatggactcacattcttgccacagatgcattcataggaatatacgtgaataattcaacagcgaatatttatatgttttgaatgttgtttaacatggtctgtgctctttttaataatgcaggtttcttatcatcagcatcgttaccattatgatgcttttcattattattaccattataatttgcatctttttgtttgattttacttgtaagctttttttcgtctcttttctttctagtaaccaacttattgttttcacttactttgttattactaataatatcactaatatcatgtctactagtcctattcttaattttctccacatcgcgtaatttagttaataatatatcaattttccttatactaatctcattgccttcttttgttgatttttcacccactttctcctcttctacctcctcaccatcaattaatatctgagatttatttctttcattatatagtctttccatttcttctttttcaacattttctttattacatttcttaaataattgtataaactcaataaattgttggaaaaatttgtttctaacctcaacatctttataatcttctccataatatttaaccaactcctccatatcactcaaggttaattccagtcgatcctttaataaatcacttttattttttgctctattagtcttatatttcactttcttcaatatttgatctctcgggtctaaatcatcaggatttgataatttacctctcgttacactataatacatagaattaatcttagcacaatattcattgcattctagttcaagttgatcaattgtagttctacccatatcttccacagcatctaaatctcttaaaaatgacattaattcagggtatttgttcctaatacaactttcaataaaatgtagaaatgaattattgttatcaacacttgatttaataaaaattaatttgttcaatgaactgattttaattccttccactctttttacattcatgtagttcccaatttccataatcatatacaatatatttttaaacgcttcacttttttttaactgtgaaatagcagtatcaattttttgcaatttataaatcaaatcatagtaatctttttcataagtagacagcactaaaaggcatttggatctaatcccccagtacgaccgcattctataacagagtttcaaaaatatttcgtctgctctttctaaaataggtaaatcttccttaacctcatctttcatatatggttcatattttctaaccaaactaggcgcaatgttggtcaattcttcctttgaaaaaaattctaatacagatacatttttaatgattgcattatcacaattcattactttattcacaaactcatccacagttaaattagaaaacatgtgcaagtttataccaaattgttgttgcaaatctcttgacagatatgacacagttgatttattattcagagcattactatctttcccattattaaaatcgttatttaaattattgttacccttcatttttaaagtaatattttctttaatcctgaatttctcttcaatctctgtcaagatcccattcatttgtagttcctttgatataactcttctactattgaaatcctcccataatgtgccgcttacattttctattttatcccaatgtatttgtttcaatcttattgaaattggcttaatcaaagccatagataatgcagctggattgggttggcttttagttggtgatttaacagacgatgattccttcatatctgatttttttaatgaagacggtaaaggtggaggtggaggaggtaatggtatagattgacttgtttcttcttttattaatgtatttgaattttttgaagacgatgaaacagctttggcaaataaaagaggcaatgggggcggtgatggaggtggtgctggtaatgtctttatctcagtgttaattgtattcttgccttttggcgtttctgtggacatgtctgttttttcttcattagtgtcttcattaataagtgatattattgacaagttttttgggaggggtggaggtggaggaggtggggcaaaaggaagagatattggagattcagaaattgtactggaaataacgaatgactcagacttttcggtatttgaaaaaattgctaaatttgatggtaaaggaggtgcagacaatacagtagtaggtatgtgcgtctttgaagaatcagaattcagactagtttctgtcttagtattattatctatgtttagtaactgtacctttgtattatctttaatagagggagatacattgtttaatatattattagagaccaagccgtatgtagaatttctaaggaggtaatatgtttcatttattggagatccatttgtccagggcatattgttttcattattgaatactgaattactatttactctgctgtattctagtgatgtattatcacccatagatagatcattaatagaatctgtgcttagtaacgaagaagttgaagtgagaaatcgactaccaaaaattgttggctcattgactaacgatggtgttgattgtggaagagaatttaatgcagctgacaaggttggtagagatagccttggcagagaacgtgacaaagtaggagatatacaatcctgtgtttcataatccttatgttggttaacatcttgctttcttgacatttttgtatgtaaatttaaccttgtatcaatagtagttatcgatgacttattttttggatccaaatatattttatccacacttgtaagacaagatgttttataaggagtagaaataaaagattttggttgtgatataatatttgtatttaaaattgttgagtctgttcttgcagatcctatttgattgttaagatcatggtggccagaattaactggtgtttggggaaagggattgtcattactagtcgaagtatgagttctattgtctgattgttttaaaattgaggacaaagaatttattctttgactacttttcatagaactttttctttgtagagcttgaatatctcttttcttgttgaatgggtttttcattgtctcaaacaaagtggaatgactcttagtgttactattatagctgccgctatgatgatttttcatattattggtaacttgatcagtataccatctttgatgggtatttattctttcgatttcattatttaattttcgtaattgatcctctaatcttcgattttgtaaagtcaaggattccaaatcgttatctttttcatctagtagaagattagcttgttttaattcttgtaataccatgttattatcattttgtaggatggttaaatcttgcaaagattctaattttaaagttaatttttgaatttttacctttgattgacgtaattgttccatagctcttttggcaatttcatcggattgcaaattatccattaatttttctatataatctttaaagcctttatctgatgcaattttgaggtttgaatttggtttgtcattattttcgagattgaaataatttgatatgtaattaatagatttaaataaatttattgattcatcatacgggtttttatctataaacttaactagatgatcaaatatgtcatttaaatgtgtttgtaaaggtgtattatctgttctttccaataaaaatgttaaatctttattatatgtagataattgattgaataatgaatcatctacagtttgatttttttgtagtaatatcgtcttctcaatatctttgaaatatcgaatcttttgattaatctgagacagatcaaatgtcaatgcatctcttaacgaatcaagctgataaaaaaagtcatgtattttgtttatttttaattgtttcaatatgatatattttgtagttatggaatgaaatgaattaattaaatttataaataaatctaatgataataagatgaatttaggtattaattcgttaaccctgccgagatgaactattttattgatactattattaattgatatcggagatgaagcaataaccaacaactcatttaattgttgaatccacaacgataaatcatcttgaatgatattccaaattatttcattgacattaaaatttctaggaataaaattaaaatcaaataactgtaataaaagcaataaagcatgacatctcaattttatagattgaaaattatcaccacggttgataattgataaaatccactggaaccagggatatttagaatctgtctcatctctaatcagaagtatattcataatttcagggtattttaaaaaatatttaaatattgattgaaaacaatttaatacaataaattcccatttcatattgttaataaggtacggtattaattcactgataaatttatgtaacacagtttgattattctgaacaaaatattgaacattactttcatatcttagttgtctttcccattgatgtaaaaaactagtaatataatcttcgctaaacaaatcccaattagaagtagttacttccaattctcgacataaccaaccattgactgtatcagatgaaaatagagaagtatcctcattaatattactattattatctttattattattatgtatactaccgttatttatagtagagttacccttctcttctttaatgtcttctatttgatttgattttttcaacaaatttgaatcggacttatttcttaatttaaatgaatataatctctttttaaactttgtattatttgtgtatggtactgtatttatctcattgataattgttgatctttttttgtcattcatttgtcatagaacaatatgatatctatatttatctatatgtatatgaaacagatcactttgagacaatttgaatgcagtagatatgtgggtgtagatagatagataaaaatgtaagcaaaaagtcaaataaatgatttatttgagcaaatattaatgtagggaatgtataacctttggttcttctctcttttttgtatgtcttgtatagtggtaatatattcaaaaccacagcggttatttacaaaaaaatataaatatatgtattttttttttcgattctctaaggtgtagattttttttactccccagaacccacctttctacaatatttataagtgagatgatgcaaacagataaataaccatatagctatacaagtgtattatgtttttgttgtgattttttatatattcaaaagttttatatatatgctatttaaattggttatagaaagttttatgaagatgcatatagttattgaaatctttgggggattgagtcgttaaaatgtcatggttcacagctaagtaatttaattgtgatactatatatgttttctcaggatcatctaatttgcatttcttattgaaattattaattaaataactatattcaagtgaatctgatacattttgatcatttttttgatttagtaaccgtattggatgactaggataatcatttggaattactactacgtatctattgttaattttattattcaaagtaaaaccatattgagtagattgtttgtcatccctaaataatctgaattgtttatttgataaaagagtttgacattgcttaatagcttttgatctttgtgaattgttagtacttggtgaaacagatgagggggttgtttttttgggcttattaaatttacgtttgtgcctactatccttatttgcagatgtggtggtggtatctttacggttgtgttgtatcttatccttattcttatgcttattcttgtttttgttatgcagttttattgttttcttctgtccgttagatactttggcaatggttgtggttgtattagtgctgtcattatgttcaacattcatcgcatacactaacaataagtcacgttattcctcagtaaatgtagatatagcccttctgtttctgtttcttcttcttcttattcttctattttttttttcttaaagtgaatcactgttgatactgaaaaaaaaaaacatatgcaatcttttcatagatcataagaatgatagtgataataataaagatgatgttaactatccaatatgtttttacaagctttacctcaatgttgaaattaaatcagatatataaaaatacaaaaaaaaaaggaaaaagaaaaaagaagcaaaaagcaattagcacagaaaaagagccccaaagaggcagactaaagactcagtatacacaaaattatggattttatatgtatttatagacatatagacaaacatatatatataaacatgtagtagtttaacgtagataacactgctcaatcctttttagattgtttcttctttgtatcctttgataacattttcttcaattgttcttctctttccttttgcatgaactcagccattctcttctcataatctaatgtggaccaccaaagaccagcttgtaagaaaatcacaccagagaaaatacatagaaggatgatattggaagaacccaaaacggccaacccttgttgttcatcgacttccccccatatatgagtaacactgcattctatgccagttttgatatttgtaataaagacacaaataccaaggacgtacatgatcaaggacccatattcgaaatattgtagatctggatttggtttatatgttctaattaagtgtccgattatacccaataatgtgatgaacgctagcccatacaataagtatggggaggtagagtgtaatgcttgataatggtttagtaccaagtcatagtcttgagcgcttggtgaacctgaattaaataagatgcgaaaatcataacttaagttggaataaaacacacccattatgaaacaggtagacataacaataattgtagaagatatagaacaaagatccttataagtaaatgacatggcgaaaaggtaaagaatgaaataataaaaaaagtcctatgtgcctgtgtttatatgtagaatcctagtaacaattcacttaattatgatgactgagtgtgtagtatatgtgtaaaatgtatttattatgcagattgataatatgcacttacataatccaactttatgttacttatctcttatatgtatattcaaaatttgagaaagacaaaaaaaaattttttttctttttataatatttaaaaacaacaaaatttgttatcgcaaaagatatgtttgattagataaaattggattaaacgactaatatttcatcaagaggaagggaaaaagaaaactcttcataggaagatataaaatactaaagtaaatgtatcctttttgctcataaatatatggagtagtatagatagatataccatgagtgagaaattaactaagaaacaacaaaaggcattacagtttaggaagaaggttagtaatgttaatgctgacactgataaaaatacaagtgctagtgtaactgataacaatcaggtagaaaagtatggcaatgacaatattgacgatgcaagtatccaaacgaaaaagagaagaaagactagacgtggtaaaggtaaaagtaagaaagctgatggcaataggtttttagtgtttgttggtggattacccaataatgttacaccaaatgaattgcaagcacattttaaaagtgcatcaccagatcatattagaatacgtaatgaaaaacatattgcatttctggaatttgatggtaacaaagaccctacttctatacaaagaagaatggatttagcattgttacaaactggtacaattttgcgtgatggtaaaaggcttaacgttgaattaacagtcggtggtggtggtaacagtaaagagagattagaaaaattacgcaaaaagaatgaaaaattacagaaggagacaaaagagaggctagatagaatgaaagggaaggctaatgataatgggagtacaaccaatacaactaacagtaccagtgctggtacatctactggtgataaagataatacttcttcagctaatttgactgcctcaatccatccagatagattacgtttattgaaggattagaattcacctacctttcatagaaatacacacaattattataaaaataattattcaactacatgtaatattggcatatccaaatacataaatataaatacacacatgtatattagattataaagtataaagtataaaagtataaatcacaaatttacaaactgatcaattagaataggaacaaaaaaatacgtctatttttgttttgtcttcttttttcaggtttatactttttttagtttacttacatatcgacatatcttacgaacaaaaaaaaataatgtaaatgtttctgataaataatcttaacatgttgtaatatgaaaaaaataaataaaataagaaggaataaacattatagatggatatattacttggaagggtttattcattaagctacagatgtttcttggttcgactgctgagtgtgttagtgccactcgaggccccgagaaaaaagaaacatcgataaaataaaaaaaaaaaaaggaattttcaatgcagcaagacttaccctattcgtattgtttttttcttgttcttgcaacttaaagtgtaggttagcaccttacatcgttttgtgacgatgtttcaatttgcatatgacaacacctaacagccatcgcccatttcttagaaaatattcgttaagaatgaaataaaacattgtccagatgcgttaataataatccacttacatcaacaatcttgtaaattcaccaaaaaaaaaattattttatactatacataacaaaatgttttttaaagggaagaataaatacgctatgtagatttaccatttcagatttcactgttattgaatgaattatgagacagagagagacaaatttctacaagtgaggtttttacaatgtcaacataatggtaataaacgtttcccctgtgattcccctccctccaaaaaaaaaaaaaaaaaatagcaaaaatagaaaaaaaacatttatgagcacatcatgtatcaactgtgtgcgtgccaggtggggaagggaaatgattattgcatcgacatttgcaaatttggtgtgctggttttccaaactttcagcttctccaagccagccatataaagaaaagaaacgtatatcacttctaacatttgtcttattccggtcttccaaaagaaaatcataatgttttttcttcttcctttttttccctcattttcttgggctcgttcttgacaaatcaaatattccggtgcacagccgcaccaaaagctacggttctcagaaagggaagtttgtgccctttcaaaagcactcctttaaaggcccaaacttttctaaaatggacattacaactaataatagttaccattactactggggggggattttattattctatccattttttccttcttctgtttgaataatgacagtcttctattaataatttctcctggatcatcatcatcatcatcatcaacatccaatagatatcctattagcctatttgtgttattgttattctttagcattagccattattttacaacataggtttctctagttttctttttctattcttctttggttacattcattgcttttattggttgattcttgttaaatagaacatatctattaaaaaaaaaatacttctattaatacatacatatacatacacatactcactctcgcacacgcacacacacacacacatatatatatatatatacttctctaactttaaaaattcttattctattctttcatacctactattatcattgtcattacatttaatagagatttaataagaaaggactggttaaagcaactttccgtttacaagcataattaataacaaaaaaaatattacgtgtacaaaaaaaaaacacctgtataaattaatatcttcatttaactttttattctttttttcccttttctaattaaatatggttcatatggataatgatactctgatggtgataccggaaaatgccaatatcgctgtaaacagtattccaactacaaatggcaaaaatctcccttcctaccaacatactgcttcctcggtgatggcacattctcacatgtctccagacatgaaaaatattttatctgacatttctgctttatctatctcttcaatgtcagattatcatttgttcaatttccctggtaaagatttacagagagaacaagtcatcgatttattagattctcaaggatttatccctgaagatttgattgaacaggaagttgattggttttataattctttgggtatagatgatctattcttttcaagggagactcctgaattaataacaaatattgttcacactctctatgcatcaaaattggattcttttgcaaaagaacaatttttaaatcaaactttgaaaaacttatcaaattcaaatgacagcaacgctaataatgtcacctcttccgttatcactaatacttctaccaatttgaacattaaaaataaaattattaaagatcaaaatcatgcaatctttatggaatctaataattattttaacacttcctatgaattggactcagagattgatgaccttttcttagacagaaatattttatacgacacaaatgatgcttctcacagattggtctctttctgtgctcctgagagtgatttgaagttgacttttgtttacaagagtaattttcctcctttgaattctcaattaagcagtaagattaaaccagatttgttggctggcgatatcgaatctattagtgatgttactctttggcaaatcttgtcacctgaatccaagaaactgtacggtctgctaatcaaattggtacaagatagagaggggccaatcatcaagactacccagtccagtgaaaatcgtgacgaaattagattgttaatagcttacaagtcaaataccacgatgaagtattactctgctattaattctttattacattactacaagttaaaaccttccaaattttacatggaatcctttggtggtcagtcaacttcaccagtcaccatcttttctatctatctaaacaaaaagcaacaaagtattgacatgttacctgatgaaatcgaagtctatattaaacaaattgaaagagaagcttctttgctatatgcaattcccaatagtacttttggtaattggtacaaggatagacaaatttctccacaagaagctatttatgcctatatcggtacaatctttatcaaccacttcattaatagattgggttctgattataagaatttgatctcacagcttaatccccgcgaagatgatactacattattggaagtcattgataatttaaagaaaaaattgagaactgaaactttcactgaaaatgttataattcaatctttaaagaaaaattataagattgtatcgaaattatacaagaattttgcacaggttcattatatttataaaaattcaactactttagaaaaaaccttatcatacaaaagattatctaaattagaaccattccaaaacgatcaagagtttgaaatgcatttgaataaattcattccaaacgattcaccagattatttaattttgaagacgttgaatttattcaacaaatctattttaaagaccaatttttttatcactagaaaagttgctatttccttcagattagatcctaaattaatcataccacaagtggaatatccagaaattccatatggtattttctttgtggttggcaacacttttgaaggttttcatattagattcagaaatatttctcgtggtggtatcagaatcgtcacttcaaggacacaggatatctttgacgtcaattctaagaccgttatcgatgaaaactacaacttggcattaactcagcaacgtaagaataaagatatcccagaaggtggttctaaaggtgttattttattgcatccaggccttgtcgataaacaacagacttttattgcattctctcagtacgtggatgctatgattgatattttaatcaaggacccgttaaaggataaatatatcgatttgttaggcactgaggagattttattctttggtcctgacgaaggttctgcgtcatttgttgattgggctacaaatcacgcgagaaaacgtaattgtccatggtggaagtccttcttgactggtaaaggtcaagaattaggtggtattccacatgatgaatttggaatgacttcccttggtgtacgtgcatatgttaagaagatctatgatactttgaacttgcacagtaagacgatctacaaattccaaactggtggtcctgatggtgatttgggttctaatgaaattctcttatcgacagataatgaagtatacgttggattacttgatggctctggtgtaatctgcgatccaaagggtattgataaagaagaattgattaggcttgctaaacaaagaaagatgatcattaatttcgataagaagaaattaagtaaagctggttttattgtatctactgaagacatggatgttatgttaccaaatggtgcaattgtttctaatggtactactttcagaaatgttttccacacagaaatattcaagtttgttgatcgtgtggatctatttgttccatgtggtggtagacctaactcgattaacttgaacaacttacactgttttattgatgaaaaaactaacaaatctttgatcccatatattgtcgaaggcgccaatttatttatttcgcaaccagctaaagtggcattggagtcacatggttgtattttattcaaagacgcttctgccaataaaggtggtgttacatcatcatcattagaagttttagcatctttagccttaaatgatgatgattttctcaataaattcattggtaaatattatcaaagtcaaggtatttcacaaatgtacaaggattatgtagttgaggtacaaaaaaggattgttagtaatgctgaagcagaatttaaacaattatgggaattaaaccaatctacaggtaagccaatctcagatctatcaaacattctatcccaaactattaacaagttgaatgatgatttagtatactctgaagaattatggttgaatgatattcaattaagaaattatttgttattggagaaaattattcctaagttgttggtagatgttgctggtccagatcaaattttacaaaacataccggaatcctatttgagagttttgttatctagttacttatccagttcatttgtttacaaggaaggtattgatgttaacattggtaaattccttgaatatattggatatttacgaagggaagaaaagaataagcgaatttcaactcaaacagcataactctggattaaaaaaggttgggcaattcagaattttgttgttaatgaaactgtaaatatatcacatcccaaatatactgatgaaaatgataatgataatgtatattgaaaaaataagggaattttttttacaatatattagccataaataaaattctataatatcctatattttgttactgttattttaaaagttgtatatgttctaaatacatatatatagttactataatatattctttttgttgaaagtatgtttttctttaatatcgttgggaagttaatttttactttttttttctttgggagaatttacagttacttcaagttcatgccatatattatgacccctaaatgtgtgaagaacaagaaactgaggcaaagaaagcagaagtgatattaactgtaaactatggacatattaaaattatccgatattgtaatatcagatttaaataaacttattcagaaggattatattctggagcaatgcatcaaaaaaaatcatgatagcattaaactgcatattggatcaaaagcgctatcttcagttacttccctttcaagtttaaatttattgcaacaatgtgaacataatgctgagaaggattggaatgaatttcctattacagattatttaaatagtagagattcagtaacacagatatcaatgtatggtacaactcaggaagacattttacggcttggtcaaaacagtgtcaaagatagtcgactcatgtatacttatcaggattctttgcaaaccaaacatttagggaattatgaaaattcaggtctttgtgcttattcaatgaatccatattattattcgaatgttttgatatcacggttggcctctcaacagattttgaatcatgcaatcaagggagatagattggaaattatggggatattgttgggttttgtttcaaaaaataattttattgtaacaaggacttttgaattaccagtattagggactgagactcgtgttaatgctcaatctgaatcttatgaatatatggtacaatacattgataagattattgaacaagatgaaatatatgggaacgagaaagttgttggttggtatcattctcaccccggctatgattgctggttaagtagtattgatatgaggacacaggatttaaatcaatcatttcaagatccatatttggctattgtggtagatccattgaaaagtatacaagataaaaaaatatttattggtgcgtttagaacagtaaaattagataagaatctgtctagtcaacctgatgtggaagaattatcattttatagattgggtatatctatgtttgattctgagttgaataagtgtattaatgaggtaaaattaacatttaaatttgacattgatagatataatagtagaagagacaagatttgtagattggctcaaacattactagaaaatatgaagcatattaaaaatatgaacagtttaagatctaatacagtctatgtaaagaaagaggattgccctgtcactacacagaatattaatgataaatatgtattacaatgtcagcaatatcaagacaacagagaaagtataagcattaatagtgaaaaatcccctaattataacgatataataaatatgattacttttgacgcaagtccatatgaatccatggtgtcaataaattccatgttaaataatagagacgtagagtttatgcataatgagacagatattgaaatggaaagtgttaatagtagtatctattttggaactgaaaatatgcttatagataatgagcaatcacagaaaacatcatttagctcaataacacatcaaactttacatcaacttcaaccacaacaggacagtaagcttcaaacgccgtctgtcgataaaactaatatcataaaagacaccattaataatagtaataatgatgatgatcataacaacaccgacattataaaaaatgatcatatcaatcccacatcaatcgctattgaacgagaacatgaatacctatcatatgtagctactaaaagattaatcataagactcaaattacaggcatatagagatttgaggttttatagagatgttttcactttataaatctgtacatcgcatactattttctttttctttttattttactgtgtctttttcttgtctgaatttttttttgttttggtttaaaagtgtaataagacgagctgaatatatgcatatgcaaatgttcttataacattaaagacatacaataaggtattgaatagaactgttatgatacaacactttagaaaatattttttcgttgtgtggcaacttaaataaaaacaaatcacattgtaaatatattcaatattattagaataattccaaataagtatggtttatagaggttttggattagaatacataaatcccccagagcatgccaacaaaccgttcagtgaattaacacctgaacaacaaggtgaaagaggtgctgagatgatggtcaactttatgacatcatgtcctggtaaatcagtcattagtggtgttacaggttttgcacttgggggtgtctttggactttttatggcttccatgtcatatgatacaccactacatgtaccgtctgcaagtggaatgaatgctattcaaaagatggcagagttacctttgaaacaacagattaagttacaatttgcagatatgggtaagagagcctattcaagcgcaaaaaattttggttatattggtatgatatattcaggtgtggaatgtgtagtagaatctactagggcgaaaaacgatatatataatggtcttgctgcagggtgtattactggtggtggattagcttacaagagtggaccacaagctgcattaatgggttgtttaggtttcgcagcattttcggcagctattgacctatacatgaaaagtgaggatgggaaaccaccaaaaaatgattttaatgaatgatttgtgtgtttgaagaatatatattaatggtagtaacatgttgatagattgaacttaataatgtaatcattattaaaaaggcagcaaatagatgtaaatactagtttcgaatgttaattgattggacaatattttcagatttttgtgagtatttatatttcttagagatcctacttaattcgacagaattttttaattcgtttatctatatatcataataatatatgctgttattataaagtaataatcaataataataatattcagtcttattagcaatgggtaaaatttaacaacatttaatattctactttatggtttgtgagattaatatatttagtttttgcttttgttttactcgtgagagtccagaagaacaaagaaagaatgaattagacataaattatttaatcaaatatgcatcattaactgtacatatatatataaatacatacttggtgattatatatatatatatatttttaaagaaaaaaacaaaataaataaatgaaaaaatactatacaacctagaccaagattgatatggttatagctaaagcaagtatgtttttattagaatattgaggagatccaattattgcaccatttttagaagaagaagaagaagaagaagaagaggcggagactgaactgttgctaagagagtttgtaccattactattttgatgccctgaatgtgatccagcaatataaccagctgctgcggctccaccagctaccacagcaggagatattccaccattattggaaccaacatttgcatttgggtttggatgttgttgattgttttggttagaggaagaatcgatattattattccctctattgttgttattattgttatttgaattagcataacttggtggtgggtttggatcagatggagaatatggtggtggtggatcgttatcattgccctttccattagaatttgaagaagatccagtgtcacctttccttgatgaagaagagtcattggaaccacctttaacagtagatccaccactatggccagtatgactaccactacctacatgagctccactactggtatggccaccaccccttcttttaaagaaacatgtaaaagcaccgattaacgattgatcatcaacataattgcatattttcagctctcttgaaggttcaaactgttcatcttcagttaatggtagagaatgaattaatgctaaaattgtaaaaagagtgaaaattataggaattttcatatcaaaactaatgtatatatatatatatatatatgtatgtatgtatatagaaaaatatatgtactttttttgagttgattgtattagatttgttaactagttaagtgtccggttttgtaaaaagctaaaagaaagatatatgtagaaacaataaagttgtctgtaatttttgtatatatatgcttttgttttatgaataattacatacaatatcatgcaatctttaaagcatcacggagcacattttgtttttgaattgtttaattgacaatttccacaaagaaaaaaaaaatacatgttctcaaaaagaggctaatgcaaggaaaagacaatggattctattgtgcgttaaaggctaattaaataaaactgcagcctggtttgagtcgagccacataattgcttaatgtattcgtatattatatgtagagtcatagatcacaagtcttgtattgttgtggtagtagtatatatataaaaagatgttatggcttagttgtagaaagctgtattattacatgctacaccgtcagaagagtgtagaatacgaataaacaaaactacttagcatatgtatagatacaaacttttcaattaatgattgaaaattaacaactttacaaggctaccatgcagcagaataaaaaagagaagaaaacaaggaaaaaaaacaattaaaaagctatagccatgaataaaatatattaaaattaagtataaaatattaagaatattgattaaataaattatataaattattagttattaattattgaaaacataggaagtaatagaataaaaaaaaattcgtggaactagaatgtaaaatgtaaggggggattattattatgtttaaattaggaggagtagggtatgttgtggtagatacaaatatgagaacaccacaaatttgaaattaataaaatggataaaaagtataaaaattaaaaggtaatttcatttagcataatttttggtttttttctttattcttgttgtaaaaatcttaagtcatccctgctgttctatccggatgagtagacaatttgggttctacatttgctggtgactcggatttggcagattctcctgaagataccgttctttggtcaggaatatgagtaacaccaccattcccagccattgcagcagcttcttgttgttctagatcggttggaccataggctggttgttgaggattatttactaccgaatcagttaaaccaagacctgaccaacgatgtaatcttgtgccaagaacaccacctgtcctccacatccctgaaccaccaaatgaatggacaattggcattgctacattaacacccaaagcaatgcaacttataacaaataagacgaatgataaacctgaaaaggcaatagaagttttagcagacctacatgcattcttatggttattagaagaatatttattagtaaatggattcacacgaccattagcatcctgaaaatccataaaagaaccatactttggattatatgttaatgttacaaaagaactaccacatgagtgtttaccaaaaacatctgcacttacgataaacccacaaagccataacaaacacataatacattcagcaattaagtatggaccgaccattaccagtttgggtattatagccactaaaataatgacacaaaggatgtaaaacaagcctattacaccaactgccaaaccaaagttagcctttttagaaccgaaaaaatcataattatgtaaagcataggccagtaacgacataaccaatactgccgaagcaaactggaaaaatcttaaaattgcccatggggcaccacttgttttattcataatgtactctataccttgttatttatttgctatttatttatttattactttttggctttacttttaactagaagtgatttatatgttttatttattggatggtatttattataaaataaacttgtcgctctatcgtaaaaagggaagagaatgcaaaacaaaaaaaaaagaagagaaagagaagtgtaagaagaagtgtaagaagtgtagaaagtctgtttgaaagttggaattagtttgtgaaatatacacacatatatatatgtatatgtttgtatccaaaatctcaccaatttattccttttttactgttattttcataactccatattaggttcctatttcaattctagatcttggctccatttctgattattggatccgcaatagattccctttaaaaaggggagaaaagtagtggaaattaaagggattatatgcataaatgtttgtgaattattgctgatactagtatattaacaaaggggtcactccctttggatgtctagaaggttctaattacaatgttcgaattgttctattggcctgctaattgcataagatatattgtatgtgtaaataaggggagcatctcaagtcatccatttcccctaattttttttttctatttttatttagtttttctttttttttttttattttcttttttggtaatttcattgtacctaggtctagtaatttctaattcttgctatccaataatatcgtgacaggtccttcgttgatcaattggcaactcatcattgcaccaaactggccatctttaaccctgtcttcccctaattccttgcgcaaattttttaaaaattcattataaagatcgattgcgatgtggcccttcgcagccatgtggaaatccggttttgaccccttgttggtcctggccaatagggtaaattgtgagactgataaaatttgtccattatcgatttgcttgatatttaatctccaataatctccttccttttccggattctcgaataaacgtaaatttaacactttgttagataacttattgatatcttctatggtatcttcggaagagattccaacaagcaacatataacctttactgatcttggagattattttattattaacagtcacagaagcttgggacaccttttgaataacaatcttcatttcaatgtataagtcgtttgtttgttaaccggtttatgataaaaatttcttctttttttgttctctttctattattatcagaaaattattttatttgaaggcaattctatctcttttttctttgtgaaaaattttcaaattgcttaattgatttcaaggtggattagagaatattaacattatcttgtatatacatttacacatgattatcaaaatgaaggtagttgataagaaataaaaaataaataaataaataaataaaagacacatcaagaaaaaaaagttattgacaagtcaaaatatattgaatgcgcacctaagtaaacatcaacccgttacagtcatcttgattattttttttcccttttgcaatcttttgattacaaaaaaaaaatgctagcgaaaacaatgaaaaagagaaaagaaaaaaagaaaaaaagaaaaaaagaaaaaaaggaaaaaaaattattgacctgatgatctgatctaggttaatttggtttaatcagtacttcgacaaatctccctatatggaaattttttaaagtactgtcataatgaaaaattctatatataacatcgagatctcactctagaatagaaacaaaggtttgagatacgaaataaaactccttaagattggaaaatatcttgctttgaatgaacaggaattgtataatgaaaaaagttgcaggcaacataatatatccatatatatatatatatgtgtgtgtgtgtgtgtttgttatgcaggatttcaattaatcagcatgcatctttgtgaacacactttgttccgaaatttatatttaatttaaataatttactgggaaaatattaattttgtcttgggtatgctaatagccatattttgtatctattctattgatgaagtatggttcgaaagtagtcttgcaaacctctaagattttatatgttcaaatccatcaacataataaaataacaatgaaaaaaaggtgcatacatcacaagtatgtaaataagtgaaaacattacaaacgacgagggaagaattatttttgtatatagtagtatattatattctttttaaaaatctagacaacatatttttgttttatatccactagttaaacatatcgaagaatatgatcttattttcagcttttctacaagttcttctagttttgtttttggttagccagtattcctatgtcgcgtaattttggtctcctttaaaaacgtttttacaagattgtagaatatgaaaagatttaatactatgtcttgtaccttactaattatgataaaaaaatctgttatagtattaaaaaactcgataaaatataatatgatatgatatgatttggcacttatactatgtttgcttattattattattttttaccaccaccactattattattattattattatttctctttctttttttttttttttttggaataatatatttctccaaagaaccaagcaaaaaaaaagatctttatctttatggagaaaaataggaaactgaaaatctcacattctacaatgtgaaagacctatacacaacaactatatgtatgaaatattgaatgcaagcaattctatcttgatcaaaataaaaaaattttagtaactttgtctatctttctgtatctctttattttttatttacctatctattgccgtagttgtcactatttgtctcatcataacatcgcatttgtttgtaaatactatgaatatagaaagttatcatgatttacaaaaattaccggcaaatgtgatacattatatacaaattattggtttattagaggaaatagaatttgatggtaaatcttatttaattggtattacacagaaagcaccgggtgaaaggttatattatattaaattacttcataaagatcatcaaagaaaatatttatacatacttctaaaatggatattatttactattaaacaacagtcaaacgacccattacaaccattttctattaccaatatcagtcaaggtaatccaatctttctagaatgccaatgcaaatacgtatctaaattaaatggtgatagtggtatttttctatctgatatgactccattagattatgatccatcaaatgatgctatgaaaaatattatgacccgtcatcgttctatatcatcaattgattcaattggaaccgttattagccaatattctgaggggacagttcccaacataatgactacaactgctatgacactagcagatgatacaaatccgttatttaatttgaaaaggatatccgattctcaagatgattataattctcaaagattcctgcctgttatcaataaaagaatcaaataccaacctatatcctctattgagagtcaacgagaagaagaagaagaagaagaagatgatgatgatgatgaattttttaaggatatgcagaattcgaagataagtcataaatatattaaaaatattgatcaattaagggcattcaatgagcttggaactgagttccaatacattgggtatataattggttatgtgaaggtttctccagattggtaccgttacaatacgattttaataggtcaaaaacatgatattgcctcaggagaaggttttattgaagtttatggacaaaatagcttgaaaattggtgaatatgagtttagttgtaaaacctggcaaagaaagcatgatcttgaaatgatagaatatttgattattcgttgcaattcaatatcagctagcacttccaatcctagtaatttagatgaagatgaaacaaataatgataattccgtgtcgaaatttaatgaccaattaataatgtttaaagaattgacattgcaacataaaaatgaacaatttgtcaggattgttggactctgtgtctctattacaaatgagaacccaaagtttgtatcattgtgtcttacagactttacgataaatgagaaggaaggacttaagtatttgtttgatagatatattgattcctgggagtgttacaaattaaaattaaacgaaggttatagggtaataatgtatccgaatttcttcaaagaattcgataaagacatacaaggggagtataagggtaaatccatatttgacttaacttctggaatgacagggaatatatcacaccaacggatcgttgttgaattgacattaagagttacacgctatggagatatattaaatttcgttgtacggggacataagatactttcatgcagtggttctagtattaccagaaagcctagaagtttaaatgaagatctgatggccagaacagcacgtatcttaacaatatgtaaagagataaagcatgaatattttgcaagggatcaaggaactgtttttaagtctaatccaataaactcagatgaatacattatgaaaaccgagtcattcaaagttacaaaagtgatagacatattattaacatacgggggtaaagaatttggttgtgaacaagataagagaatagagattttatgtcaaggtgaattattggattcaaaatctaaacagaataaaaaattgacaaggataattattaacacaccagatttattttttttgggtagtgaaaatgatgttagtaatattgatgatggtgattgggatgatagtaaagatatccaaagaagatctatattaacagagactatcactaaattaagaaatagaccaagtgtgaatgaagtgacgataacggacctggcagtggcactaccacatgtgctacacctccctgtcatcactcgtgaggcccgtgatttagtgttgcaacagttgttgtagatgacgtcatcatttccttattaatgggacttatagtaacataataccacacacaatagtttgatatggtttttgcaggaaaaaacaagaaaaaaacaaaacaaaaaaaaagggtaccaaagagataataagatgtaccgatttgatttaatgatcccttgcaacaatttaagggagataataaaaaggaaaataaaaaataggggtaggagaataaattgtccttctcaatgttggaatttcttagttttgtttgtttgttttagttgcacggcttctttttcttagggtcaatgtggtcaacggtaggaatacgaaatcggagaatgaatggttgttggtttcattgtgtgtatcaataggcttttaagtaagtagaaagtatctaaagaagttgaaacagctggatgaagacgtaaaggccatctgtggattttttgaaaaaggttcaacaccttataaaataagggattttaaaataaaagtgggttgaaatgtgaatcatcatgcctataggatatatatactcataagatatatatatatatatatatatatatatataaattggttgtgtgtgcttgtgtgtatgtatgtctatattataaaaggtaatagtaaccctttatgtatcagatagtatgtttctccttagtttgtttattttatggctttgattgattgataaactagttccgtttttatgtttggaaaaaatctatttatactttatataatgccttgtttcatttctcttagttgtattcctttactgttgtatttgcttctatcttgttgaatgtttcatgtcttcccgttttgcttgcttgtttttatactgtatctctctttctcctgatatactttaagttttacttttgtttacttagataatattttatatttaccacatatagtctcacacacacattatttattctcctatattagttaaacatttgcttattatttggggtaaaacttactataagactttgacgcaaatataatttatttatatataactaaagaaataggtatattggagaactatctgtacatttagctacttattcactaaacaactttttttttattattattctagagtttttcacggttgtaaacatgtcattttggtttaatattggcagtctcgtttctttactctttttacttggggccacgattatgactttctttttaatattgtcgggtgcaagaaataccggtatactgaaaaacttttattggattgaagcaaacacagctggctttaatgatgcttcaaacatgacaagatggttcaattacgaattctgtggttattcaaatgatcaattgttcaattgttcctcaaaggcaccagcaaaaccgttttcgccaaaagacaattttgggtccaacccattaatgccaacaagtttcttaaatgatagagatgcgtactattatctgtcacgtgtgggttgggcaatgttactgattgcagttttttgtgaagttatgaccctagtcccacaaataatcagtgtgtttaagcatattagaagcttgtctatttttgctactgttttccattggctatcactatttttcattcttttggctgcatgtttgcttactggttgttatgcaaagggcatcagggcttttcattccaagaataggcatgctaagctgggtgcaaaatgttttgctttactatggaccacagtctttcttcttctttgtacaagtatttggatggcagtagcaacgtttttaaaaaatagggaaaagagaaaatccgctaactattatgcaacaccagttattcattcacaagatataaatgaatatgactatgcacatccaactgttcctgtaaccaatcagtcagcagaaatagtaggtgggaattatgaagttagggatatatcaaatcaaccttcacagctaccaagaaatccaaatgttgttgcacctgtagcaaaacctattccatcagcctctattgataatagtacagcctcaaacccaacaactacgaaacataaactttttaataagatcaaaacaagaaagcacaataataacaacgacaaaacgaatattgataatactattaatagaccagttttgcctactactaaagaagaagatgaagaatatgaagtataaataaagtatttacaattaatttgcacatattctttttttttttattttatttttgacataatcttctttgcagcggtcaaacattgataacatatctaatattttatcattcattttttactttattcggttttattcgatttcagttttaattttccattcaattttatatttgtagttttgtttttctgaacaacttcacattgtttttaatattcgtatcataataattatattacctatatcattttattttaatatttaatattacttttccatttacatatatatatatatatatatatatattaaataagaaccaccaataaactttcaaatttgtctttttttctttattaaacctatactaaagcatgatataattgaataatggtttgtaatattttttttggtagtagataagactttggaaagaatactttgaaccaaaattcgtatttctagcaattatcctcagtacccttttctgcctatctccaggtgtttcttttattttagattttcaaatttttgaagggttacttctgattatttagtcacatagtttttaaaataaatactatgctcatgaagtcttttgtagaatttgtataggactgagattttagtttgtatatatatatatatatatatgtacgtatgtataaactacataatatttttctagcacttccattgagaatgtttgccaatgcttaattctctctatctcgtaatatatatatatatatattttaaaagataaaaaaaaaacttccaaatatttaagtaccaaatagaaagtccgtaatattaacgaagttatcatgcaaagatctgttggtattccaggttgtgggattcctactaatgactataacaacaaattggagtcgcctcactatcgtgacaattttgacaatcggttcttatacaacttaaatcatcagcatatcccccatgacacaactaacatttattcttctcttcctaaacaggaaagtccatttaccaataatgaattggctggatatatcaatattccaggtgcttttatgaaagatacaaatgaggaaatggttattttacagagtgatcaaagagaaattcataaagatgttattattagtgatttgtctaatacaacaagggaagaaacaccaagatctatatcgattccctataagactttcaaaaactctagtgttgtgcaacaattacagtcttattccaatttacacaaggcatcggctggttttgttagtttcaatgacacttataattcaacaatagcctttgattttggctcaagaaattataatctttctacctctagttgtaaagaaatctcttcatcctttaaccaaacatttatttccactcagaaacatttagcaacaaatacgtcagaaagctattccaaattcgagcctaaagtttttataggtgtcagtaaagaagttgcaggaaaatggacaagtttagtttatccatgggaaagaagtgttggcaacaaagtaatctcaactgcaagtgcaagggaaatttcttatcaaacaataaggtcaacaacaagtattccccaatcgtttttatacccgtcaaaaatttctcctgatatcttttatgatgctacatcaataccaccaaactctatctctcttaaaaatgttttttcaaatttagtttcttcaaatactggtgccggcatgtctttctcaacaccttgggaaatgggtttcaataataaaattatgtctactgcaagtttgaaagaaatttcctatcagactaaaatgccagtaagggatatacctttcaattttaatagaaacaaggaaccgacaaacaaatttccacaattatttcatgtaggtattaatgtagtatcatcagagactggattaggtggttcttttagtaggccatgggaaatgggattcaataataaaaaattatctacttcaagtgtgagggaaatttccaccaaatataacaaaacagtttctgacataccagtttcatcagttaatgaattttttatttcacccattagtggtcatatgctaaatacaaatgttgatctattttcatctaatgctggtgcatttttctccttcagttatccatgggaaatgggatttaacaatcgatcaatttctacttcaacagctagagaaatatcaaatggatctaaactcaatgttattgatatacctcgaggttttcaaacaaattatcgtgtcaaaaaaaatacccttcgttatatggatttgcctattcgaaagacaaaaatgttttcagtaggtgttgatgcaatgtcgatgggttttggtagtggtatgtctttagcaacacctaatgatatggggttcaataatatgccaatgactagttcaagtattcaagaaatatctgcaaggtcaaatagcactgtattggattgttctcaaggttttaacaccacctgcatgaaacaaaaaatgcatatagatagattagcaaataatgatttgaaaaatagagatatcatggctccattaatggtaggtgctaatcttggtcctagaaatccttttgtttctccacactatatgggatttgataataaacctctatctatttctagtttaagggagatattaccaaacagagataaaactgtctattttccgcataatactttaactttgggttctactatatataatcctgacaaagagcaaaagttgaataaaaacattttgtctattggtttgaaaaacattgttggtgccaatgttgctgcacaaggtccatcacaattcaaattttatccaccattaggaataaaagggatggtaaaatctttttcagagatatattcgcctttaaatataaatacagacaaagacatttcaaatgaacttcaagaacctttagagggcgcatttatgcctaatgtgatattagctagagaatttagaggaaatatactgttacacagtaaatccagtttaactgagcatattactaatggaaaatacaacctattatttgatgatttacataatgcaagaataactaccaatatatttggttcaaatctaaaacccttaaaacctgttactttagtaacttcaaaaaaaactaatttggtacctcttttgaatatgtatactgatcaaaagggtactgcaaataaaaatgttagtgaaaatcagagattacaaggaaatcttattgtcctaagttctttgtcgacagtagatgagtcagataataaggctccattaaacaaaaaaatgtatcccttaaatttggaaattaagccaaaaaagaatgaaataattaccttagattcgctatttgaaaaaataggaaatactggaagaaataaatcttctgccctcaacacccaaccaaccacattcaaagctaaattttctgagcataacggtaagttagcaagcaaacgtaattattggacatttacctctgaacctggacgtgcccgtatcctacaaggctcaagacggccggctactgaagaacagatatctggaaagaacaatctacatgtaggctttgatggtcgtgcagttaggagaaagtcattaggctctgttactaagccagaaggggcgggatattatccaagtttaatagatcctgatactcctacttatggttttaatgaaaatatagatcatctgggcttattggcattaaatgaatattatatcagtaatcctattaccgaagttcataagaaaagattatcattttcaaaagaactctcgccaactggtttatttaatattggtgagacagcaggcaataaagaatctcagttagaaatggcatctgctgaatcaatcgatatcataaatacttcaacaccaaacccattggaaagaactgttccacggccattcatcaatggtttggttagtgaacagagacctgcaattcgtaaaccaagcccaagaagaaagagtaatgctttgaatatttttgacaaattcacacaagtcataacaaaatcaacaatatagacatgttttatggtttcatattctttaggatatctatataacagttttatgttaaatgtttatgtatacatttttctaacatgatgtaataaaattcgtttgtcttgttacgaaaggaatttagcttgtcaacaatatagaaaaactgaaggatttcaaggttggcaatttatcttataaattctttactctatttttagtgtctttcaaaaccattaagaaaatatatattagtatgggtaatttacaggagcttattgtaaagataccgctcttaaaaaaaaaaacaaaaaaggttaaacaaaaacagctaaaataaattacttattcaatattgttattaaaaaaataaacatatatagtagtttaatttgggttgtagaaaaagaattcaattaaaattaaatgaaacacaatatgtgtatagaactaaaaaagattggcagtcgaaataataataaaaaaataatgtgtactcaaaatataatcagaaatgtttaaattagaagtaaaatagaaagtaaaattagcactaaaggattttttacattagcaccttttccctcgaagttcttatcaatgctagcagttggtgaattgccagaaagtgttgttttttctttagttggagaattttgctctacggcagaagttgaaatagcaggaggtaatataatagtggtacgctccaatgcttctgaagacttgataatgactgtggtataaggtggacatggttcaccatttggacctgtagaaataacagttgtaattgaactcttggaaatgtatatatctgatctaagagtagttgtagcagaactatgttccccttgagactttggcactgttgtaacaataacagttgtatatggtgggcatggttcgccatttggaccggttgaaataactgtggttatagtctttgtttcagatgaatgtcccccttgagactttggcactgttgtaacaataacagttgtatatggtgggcatggttcgccatttggactggttgaaataactgtggttatagtctttgtttcagatgaatgttcctcctgagattttggtactgtagtaacaataacggtggtgtatggtgggcatggttcaccatttggactagttgaaataactgtagttattgtctttgtttcacgaacagtaggtggtaccataattgctggatgtgtaatcggagactttgggattgtagtgacaataacagtggtgtatggtgggcatggttcatcatttgttgttgtggagcaaattgttgtataggtgcttaaagttaccggacatattgtggtaaaaattgttgtgattggttcacaaggtttattatcacaataatctgtaattacggtagtaactgtagttgttatgggtggcaattctttagtatgggtttcatgttgtgtagttaccttacatgatcctttttcatcacaagtagtaattgtttttgtttcagttgtatctacaatgttagtttcggtttttgtagtgacagtacaaatattatcttcatcacaaatagtagtaacgctaactattggtgaagatgtaatggcatggctactcactcttgaagaaagagaagtatgaccattagatttagaggtgataattgaggaagaagactttgaaatggaagagtgctgataagaagatttcgaaattgaggatatatttttagactgtgatgaggaaagagatggagatggcgatggagatggggaaggagatggacttggagatggagaaggagatggcgatggagatggcgatgggcttgggctaggagatggcggtggagatggcgatggtgatggagatggagatggtgatggacttggacttggagatggcgatggagatggcgatggacttggacttggacttggacttgaagatggcgatggtgatggagatgggcttgggctaggagatggcgatggagatggcgatggacttggacttggagatggcggtggagatggcgatggtgatggagatgggcttgggctaggagatggtgatggagatggtgatgccggtggagatggtgatggacttggacttggagatggcgatggcgatgggcttgggctaggagatggcgatggcgatggacttgggctaggagatggtgatggagatggtgatggcgatggagatggtgatggacttggacttggagatggcgatggtgatggacttggagatggagatggagatggcgatggtgatggcgatggtgatggacttggagatggagatggagatggcgatggagatggtgatggacttgggctaggagatggcgatggagatgggcttggtgatggtgatggtgatggtgatggcgatggtgatggtgatggtgatggtgatggacttggacttggagatggcggtggagatggcgatggtgatggtgatgggcttgggctaggagatggcgatggagatggcgatggacttggacttggacttggacttggacttggacttggagatggcgatggcgatggacttgggctaggagatggcgatggcgatggacttgggctaggagatggtgatggagatggtgatggcgatggagatggtgatggacttggacttggagatggcggtggagatggcgatggtgatggtgatgggcttgggctaggagatggcgatggagatggcgatggacttggacttggacttggacttggacttggacttggagatggcgatggcgatggacttgggctaggagatggcgatggtgatggagatggtgatggacttgggctaggagatggcgatggagatgggcttggtgatggtgatggtgatggtgatggcgatggtgatggtgatggtgatggcgatggtgatggtgatggtgatgggcttggactaggagatggacttggtgatggagaaggtgatggggatggaggtttgcaattgtgatcacattttttataccaataatataatggtaaatcagcatttggatttccttggctgttaccattacagcctaatgttaaatcaaagttagtttttccccaaccctttctgatccagtcactgctgtagatatattcgtaatggatttgaaagggtggtagccaaacatagcatggattctcgtgtgggttgccaaacacagtgaatgttgttgtaaaatcagatggtttgaaattaggtggtgtgatacctccatttgcatcccataatgggatggttacccgtggaccttgaacaccagtgatctttaaagaagataaatgtcttaaaggaatattttcgcttgcatagacatggacagtaatcatataaatattgccagttagatattgaacattttgtagatccatttgataagttggatttattccattatttttttgatggagctgaaaatttaagtttggacaaccgtttacaatttcatttttagcacatacgtcaacaccagggagatgattgggttctgtatcagcaacagcgacaagtagattggttataatactgatgtacagtaataacaatgaatagaacttcattgtttagatattatttaaagaaataatataaaagtaaaagtaggataaactcaaaagtaaagtaaaattatggaaaatcggttatttttgtttttgcttttgtttttgtttctttatgatagaacaaaataatatgttgttatatggttaagagcagggttggaaagaacaagaagatagaaagcaaagttgcagctaagaagagcgaggtaaatatggtgcattactaccttcttatatatcatgagtgttgtacttcgatcttattttttttttttcaactgttgtcctaactatgagctatctaaagaaatagttataataacatttgcaattaatgagttgccctgttgccttttaactattcctttcttgagagagatggggggaaagaaagaaagggggagagagataaagagaaggttgcttttttgggacaaccgttaatagatattaaaggttgacaatgacaataatatcgaaagcagcaccagtaccaataccagaaagggaaaaaacgaatagggtatactatataactactgataacaatgtcatccccgtatctaataacaacgatagtagtagtagtatattagtagtaataagaaacggaaaaaaactaataaagtatactacacaactgttaacaacaatattagtcctgtgggtaacaacaatagcatctgtagcaacaattgttgcagaaaagggggaaaagctaataaagtatactatataaccactgataacaatgttattcttgtatctaataacaacaatagtagtaataataataatagtagtggtggttgttgttgttgtaacagtagtaatagaaagaggaaaaagttaataaatgtatactacaaaactactaagaacaatgttattcttgtatataacaacaacaacagtagtagtagtagtagcaattgaaatagaaaaaaatctaacaaagtatactacacaactaccaacaacaatatcatgtcagtatgtaataattacaccggcggtagcaacaatgaccacagaaaagaagaaaaagctaataaggtattctacacaactattgacaacaatgacattcttgtatggcaacaacagcaacaacaggtaagagagttctaaatatctttatctccttttcatcctctttctcttgccaatattcttcaatcgaaaaaaaaaaaaataaacgattgttagcaaattaattaactgattatagatgtacgtgtttgaaaaaatcgtttgtacttcaatataaccctcttatcttctttcttctccatcattctatctagaactgtgtaatcttcttatctgaacaaagataaaaatggtgtgtagtaaaatatttcccttgttgttttgtttttgttttgttttgtcttattttattttgttttacttttagttgctactatttctgatggcgaataatggaaacatcttgttgaataagaggagaatatcttatttgtaatctataacaataacaataataacaataataacaataataacgatgaagagataaggaaatacaataaaactcatcaagacaggcaacaatgagaagacggagaaagcaaacagaaaccgtttgaaagtcgaaaacttgaaatacagtgcttctagaacttgtcacttgtcgatacttatacatcaaccgaataaaactttgattgtgcacagaagaacgatggcccgaacacacactgtcatattgttagcaaagttctgctaccggtgttattaacgggggaggggaggaagaacaatggatatacatattcacattctccgcttgatccgaaaacatatcacttccttctgcggctgcttccgtggatgtatatatgttcttcccttttttacaaagcttaaagttgcatattatatatatatatcgcacattgtgtgttacaaatattacaactaaaaacctctttttccttcttccggctatttcggtttttttttttcaaacaaaaacaaaaactaaaaacaaaaggctgatattaataacaattcaaaaacaatatacgtaagtatgtatagcatagatatatatatatatagaacttattgaattcttgttatttgtgttacatactacactaaatacatatatatctcaacaacactttagctagggttaattcatgttcgaccccgatacaatcgatgctaaatctgaatacgtttcatttttcttcaactgacttatggaattcactgatgttgttcttacttggctatctgttctctcgctacttgccacatttctttttttcaaatgtttttctcttaatttcagttcttgtgccttcttctccaattcctgaattcttctctgtaactccttcgctgactgtgcttctaactcttctagtttttgttgttttgcaatgatacgttcatgtcgtaacacatatggtacagtctctgagatatttcttaatttgtttctttcattaatatctggcgacatggatccccttgtagcatcttttttaattgaattgataatgttttgattctctaatttaatctcctctgacatttgtttaattggtgattgttgttgatcattattattattttcacgttctttattttcatctcttgttgtagcatagttgttttcattataattcccaccattctcttcgaatgagtttttcagctttggtgtggttggattaccattttcattcagtttattcgctaaggattgcgacgatggtatagtacccgtatttatcaacgatgcaaaattacttaaacttggtactgcactggctcttttatcgatgttatcttctgtagaattagttatttcattgaatctggtgttgtttgaattaacatgactctccgatgtgacacttgacagtttctcagacctgtagttctcatataacaaattctgggttgtatctttaaattcttgtaaatgtgatccaaataagacatttttcagtatcaataagtctgacactttggaatcattaacattctcgattgacccccaaggatatttcctatagtaatggcctgtcttattatccttggtgtcggaacaaattattgcaaatggttgtaatctagataaagtttcgttctcttcaatagactcataatcatcttcatctggatcaacttcgaatttaaatacaggaacactatacctttgaatatcctccaatatgatttttttaaaattgtttagttcctcccttgttagactgtctgcttttgaaattatcggtaagacatttgtataacgtgaaacccttttcattagttcaacatccagttcactcaacccatgtccattaggttcaatgaagtataacgccacatggacacgggaatcttcgaaccgtgggtttcttctgatccttgtttcttctgctaaaacgtaatcaaactgttgttccaaaaaggatgtaatttcatcaaaacagatggagtcgtctaaattgtcacctatgccatacgtattgattaaattcaacattataatatcatcatcttcgtcatccattaaagaaggggacggtgtgtcggatccaggatttggtccagatccagaacctggtccactactaccagcactcgtgatgatctctattgatgtggaggttattgtgatcccaggttccagttgggatctagatggatcaaacttagtattaaattggtttggtaaaccgtcatttgaggtgaaagagaccactttagtcggctttgtcaccttaatcctgtctgagattacactaggtatattgtttgagttaatatcggattcgtattgatgagaaaatatattggtctctagtaaattgttagcaaaagttgtcttaccagtaccatttctacccagcaaaagaattgagtacgagataccacgtttatattccttttttctgcggaataatgcagctgggacttgaggtgaatccattctttaaaacaaaacaccaaagaaaaaaaaatatatatatatatatatatgtacagagagaaagtgtatgtatgtgtgtgtacgtatgtctggtacagtgagcttctcttataccctcttctctgtacgtaggtgtgtatgtgtgtctgtgtgtatgtgcatgttttatatgtgtttagaatattgtttgtatctgtttcttgctataatctgaaatatttcagtctgttcgtgtttaatctcaaataatttgtaagagatctggatttgtcttttttgaagaattcgaaaccctaacaaatttcattatttcaactgggaaacagtaatatgttagggctaccaagttttgaaacgacattactgaaatttttataaagggtaaactgtttttttctatgaaataagaaaaattttaaaaaaaaaaaacaaaaagagaaaagaaagcaaacacagacctaacggtgtccaagggtttattcaagggtaaatgatcgaatgccctaaaaggacatattttccagtttgcatcattatttattattttttttgttatttcttttttttttttagaaaaaaccggaattatgcggaattaattcctgatagatcccttttacggaaaatagctttccgcattccggcttatatgtctttcctctttaataaagtcttactttatcaggaatgttttccctcttttgaataattttctctattggtacacttctttagttttttttcttttttttctttatttttattttctttcatacaaaaaaagataaaaaaaatttttcatttttttttttcattcttggtagaattttaacgagaaaaaatacgttgggacaaaaggggatgattacttcgtttgtctgtatgattaagaaacaaatttatttttcattttttattcattttgttttgttttgtttgttattttttttttgcgaaaattaaaccaactctctgaactcacaatggctttgcctgtgtaaatcgctaaagacaatccgattcaactgcggagatcgtaaaatttttgatattgactgatttgtttttggtctacatatatatataagatatatatgcttatttgtgtgtagatctatatgtacatacatatatgcaaacatacacacatacatataaccatattagtgaaaatacgaagtagcctcctaagattaagccatttggtcaatcatttgttcctattactaaacaatctgttggttcagtattacatctatatacattcgtgtatagggtaatatagtattataggtttattattattattgttgttgttattattgttattattagttattattagttattattagttattattagttattattttggtttttgtctcatttatatatttatatttatatggatttctgttacaagaagaattttggtaaacactgcaatttggttttatagtgtaatggattttggagctttggaacttaatcaatcacaacaacttgatataactcgtggtggcagtggcaatggtactagtatgaataataatggagcttctattcaactgatggaattgacaaataatacgcatatagctggtctatttcaacctgtttatccactttctaaaaaagatattttcattatcagagcttacaaaataatcaccaaggaatctatcttaaacagcaatcatatccaacaatcactaaatgtagtcaccaaatctaatgtatcatcaaaggattctaagaatcataataataataatggtaatagtaatagtaatagtaataataatcggattagaggactggttgtgcatcctcaatattctaatacctttgataaaatttctaaaatttttaattcactcctgagtaaaggtaccatgggtgatgatacaatatccaccaaatcctcaattgaactgtttcaaaggtttcagcagattattaaagaaatagaattgagttttgataattctcccttttcgaaatattttaataaaataaatgacacccttttccaaattaaaaacagtagggaacttagagacgatcttcattggaagactttatcagatgaaatattatcagtttataatccaagaacaggtagaatgataaatcaaggtagaaagaaaaataatgcaaccacaaataattctaataatactattattactgctaataataataataagattattgccaataacaggattaataaggaaaataagagaacttttgtcattgataattgtatttctaactctgctactaataactataataatgcaaattggagtaatatcagtagtcaacaagatataaatactaatagtacaaatagtactttagaagatgaattcattaatatgaccacagacttactaaactccacgaatagtattgataatggtgctaataatgatattttggcgttgcaaaaaaaattaaacaacactttgtctaatggaaatgatatccacattaatggtagcaacagcaacaacagtaataacactaacgctaacaacaacattcataataatagtaataatataactacaaatgtaagtaggtctatacatggaccttatacacagcctaccagtccaaatatattgaatagttttacatttcctcttgagtcaaacaccataaacaatgatacaaatcttggagagtcacaacaccaacaacaatttcaccaacagaatcaaatgattagtatcaatttggattctacaatgacaaataattcaatacaaaatactaatcatcgaaaaagaaggtctctaggctctgtaaatctagattctttagattccattggaatgaatgatatattaaaatatactaatgctaataaaaggcagagactaaatgaaatgcctcaaacaaacaagcaaatgtcaacattgttagataatacaccaaatagcatagtaagtacagcaactattacaaacacaaacaactcaactcaactaaacagaattgataatacaaataatacaagtatgacagatgatatcgttaataagcttgatgttaataatgcattgtcttatggaaaaaccagtatgatgttacagcaaatggatcctgacttaaatgctattgctttgaaaacaagtaataagacaatggggccagttgatttaaacattttacaagaagtgaaaaattcgtattctactattttagatgaaaaagacaaaagaattcgatctttagaaaatgagatagctttacaaagacaggaaacaatgtggttaagaaaaatgctgattgaggatatgggatgtgtaaggaatttattgaaggatatgacaaataagtaaatttttctccattttcacatatttaattatcaatgtcttcaaaaccatttctttccctaattgttattggggcttcttcatttgttttttttattactattttatatgttaacttaggtccaactatattatatattcgttatatatttattttaatttcagaacattgtataattttgtatttgatataataaataaaaaataataatgaaattacaagcaaaaagagtgtatgtgatttgatataaacgttacaatgaacctaaatagggtaatgatataaaaataatgatgtattgagagcatttaagccagttcttcaaaattgtgtgaaaacaagaacgataaacatttaaaaggaaatcatgcttatgttcataagtttttttctattttcattctttattaaaatatatttgattacaataatatttatgtaaaggactatatggttttagaagatgcctaatagtgaaaaatatgttacatattccattacataaatatatttttacatgtacattatgaatattctaaatgacccacacctataactttgtttgaaaggatgggataaatgcacttcatatgatatatattagcaaattataatcgaaatttaaatccatttgcaatttttggctaagtatttatcatattaataaatcagatagtataggtgtacaatgtatatattatacttgtagcctatttttttacttctttcatagaaatcatgaagttcctaacttatagaacttagagcgatggaaaacacacattgcacccggaaaataaatgtttcaggtttattattttgtcatttagtttaccacatggtttgaagaacagttcacaggtactttgtgtcaaataagaaaaccttttttataaataataatattttcaagaacaaaaaaaaatcatatgcaattagacctttctcttggacattatttcgtcaattaaatcgtgtccaacaacttccctatattgttcatcagttaaatttgtttgtggcccacggtaaaatttctttttgtaaatgacataataaagccatgatagaaaccaaacactgccagctaccacacatgtataattcattgttgacttagtcacatcatgctgattggttggaaacattactattaaaaccagaaatacttggtatgttactgcagtccaacctattactggagaccaaaatctgcctaagtaaaagggacctggtctaaataattgttttccccatgttattctcataaaagtgggtgtaccccaggctaaattattacctgcaacattaagactgaacaaagctgatgcagatgcgtcaccaattaagcacagcaaaccaagtactagagatataaaacatgtaaatataacagcattgaaaggtactgggtatttctttccaacttttttccatatattggagaacggcaaaccattgtcacgagaaaacgcatatacctgccttgatgttgatgtaacaatcgatgcacccatcaggaattgacaaaatgccattaaagacataaatgcaatggcccattgtctgcctaaagaatcgtagattatttgtgccattgcaaatccatatggattgttaataacgcggtttacgtcggtagacatacacgcagtcgagcagataagaatacaaaagccaacaatccaacataatgttatggagcttactattcccattggaactgatttccttgcattttgagcttcttccgatgtatacacacaggagtcaaaagcactaattgtccacacagcaggcattaaccctgcaatacaaaattgccaaccattattccagtcactaaagttttcaaatttaccaaatataaattttccattgttgaaatggcccacattcttctttgttccaataggtaaagtgatgaaaaataaaagaataataaaacaattagcaaagatacttaatgtctgtaaccgacccacagttttagaggccaaacatgcacaaaatcccattgcaacaacagcagcagcaaacacaccatatgtcatgccggtagtgactttaaaattgccattctttgataaaactacagccgcaaggatttcttcagcaaaaccgtaatcaattgaacaaacagcagcgactaaggctagagtatttgaatatccaatgacgaacgagataacttccttatacccagttggagcataataatgtgtccaataatataatccacctgctgtgggaatagaactggcattttctgccatgtttatcccaacagtaaggataaacccacctgcaataaaccaaccccaaattaaagtcacagggccacctgctaaaccacctgccataacagaagcaattgagggtaataagcccataatagagaatgcaacaccaaagacttgaattggtgtgaattgtcttcttaattcttgtttataaccaatttcagctaacaactgattatcagacgtcgcagcggtagtatttatatagtttacttttccagcatctgtgtgtgaagccacagatctgaagtttgaaaatcttggaaaattgccttcatctgtggagcttgtgtcaacagagatgtcttgcacagtaacaatatctgattttttttccaaatcagacatgtttataatatattggaattgaggctatcttttagatacttccgttttctcaataactatacacgccaagcccacaaacgagcataaacaagttctcaagttatttcctactttatgtcgattgtgtttgtttatgttgtagtctttctattgatgggagcctatgttataatcgttattacctttcaactttaaatttgatcaatatcttctcatttggattagtgaagaaatagtttgccaatagttcaattttttaaaaaaaaaaacaacaacaaaaaataaaccttttttttttaatgaatgagggtttgctacttttttcccggaataaatgtttttacacattagggtatagaaaaaaaatacgcacacaaacaactcgcagttaaattcctcacgacttcttcgttctcgttgagaaagtcttctgagtgttgttggagaataaaatattggtttcaatagaagacattaatatctgaagatataaaatttgggcctacattagtgggctgaatcatgtgttagaaatggcttttatcaggaaatcaaggggaactgttgatttattttaaaaatctttcttttttttattattttttttttttgatatttggtttggcatttttatagaaatgtatacttttctttcaatagtaagttattcttgtgaaaactgaccaagatatattttaataaacctttattttgacgttcttgtttcaaaggtttgcttgaaaaaggccgtaaacataaaaagaaactgaattaaaaatacaatttttaagcctttgtaaagatataaggacaaattaaatatttataagaatcttttttttcttttcagtataagttttttttttaatgaatctagtgtaattctttacaaattagagtaatttatttatcttcaaactgtttcattataacttaactttgttattgttacagcatcatttttaaatgattaagtaactcaaccaaaaatgttttttcaagaaaggttgtctttacttgactttgtcttttgtagatttgataaggaagaaagtgggattttataaattgagtttttgattgtaaccaatttttaagcacaatcaaagataaagagagagaaagagagaattaataataataataactgtattatactggcaatgtttaggagaatattaatgatttattagataatttgttttaaattaagtaattagataaagaattaaagtatttaataacaagacactacatgttgaaattatatatatctgatattatatgatatgataatttttataaaaggaaattactaaatttgtataaaactaggtaacaacatacttcaattttaaaattcagaaaactttgacttagtcttttattttggtattggtggatagtttaataaaagttgtataaactgatgctctttgagtaagatcttccttttattccatgtaaaataattatttctattattaggtttctggtagaaatgtgggtaaaagaagagtaatttttcagaaatttttttgagagagctcttttaaactaaacaataaaaaaaatagataacaaacataccttcttttctatttaactcaaaaaatctacaattaatcaaacaaacacaacattatttcgtaactcttcttagttgtgattatttatcaataatatttctgttgaaatggaatattctataatgaaatagatagaacaataagattttagcagacactaaacgataaattgttgagtaataatcgttgaaaggtcaccaaatgttgttgagtttgtttattaaatatcttactgttcgcagtggaaaatggcttaatgttaacatatataaagccaaggatttcaccatacattatttttatcttatttacaatctttgtatataattatttctatgttgtatatagagaaagaaagcaaagagctttattataattctgtgtaccaaatctgtttaatataatattgagaatgtttattatatatccaatgactacaaacgctcattctcaataatttcacatgttaaaagttttgattgtaggatttattccaagaagttcttattccaaataatcaagaaagaaaaaccttagagatcattactatgtgtagttgcctaagaggaaagaatgactcttgtgaatatgatgaataaactaccctataggagatttacacaatattccaagttcgcacacgtccgataatatccttataatcaaaaaaataataattagtgatataaagaagaccccagcttcttataaatctttttttttttttcacattcgtatattttctttatcaaagttggcggagaaaatttccaaaagcaaaaaaagtatagaagataaaaaaaacttaacgtgaataatttttgttttaatagagaaccattcgaaacaaacatttggtagacgataaactaaacttcctttctgttactgatccaataaccaaagttgacaaaaagtgaaggggttaataaataattttccattatacatatatttgcgtactttatcaatctgttaattgcactcaacccagtaaacaagcaaaataatcataataatttgcgaacataaatcaaataaataataacaatataaattaagaaaataatcatgtctgattggaaagttgatcccgaccatcgtagacgtttgttacaactacaaaaaattggtgataataagaaatgtgttgattgtcacgccccaaatccccaatgggcctccccaaaattcggtatatttatatgtttagaatgtgctggtatacacagaagtttaggtgttcacataagctttgtaagatcaattactatggatcaattcaaggacgatgaattacttagaatggaaaaaggtggtaatgcaaactttaatgattatatgtctgcacatggtgttgacttgactttaccgcaaactattaaatataataacgttattgcagaagattacaaagaaaaattaacttgcgaagttgaaggtaaagcttttgttgaacctgaacatccaaactttgatccatctaaattaggccagactagcatcacaaataattcaagtcaatcagaaatacctttagaaaatcgccgttcagttacaccaaagattgctgacaatcaaaaggaaaaaaatgaggcattctttgctagattaggtgaacaaaatcaagctaaaccagaacatttacctccatcacaaggtggtaagtatcaaggcttcggtagtaccccagtaaacccaaataataacaataccagtaaaaatggtggaaataacactttaagtttagaaaatttacaagcagatccactaggtacattatcgagaggttggaacctattttcttcagcagtttctaagtctgttaacgatatgaatgaaactgtcattaaaccaaaatatgagcaatggcaatcaggagaattatctgaagaaaccaaaagagctgctgctcaatttggtcaaaaattccatgaaaccagtagttatggttacgctgcgttaagcaaatttactaagactttgcaagaccagtactataatacaagggaacaacttaactctaactatgaacccatcgaaaattctatcaacagcaatggccataataaagatagcaatacaacacgatctaatccagaaaaaacgaaagatgataaatgggatgacttttagacgtatgaatcataatattatctaaaaaaaaaaacaaaaaaagaaattatgctttttgcatatatatatatatatataagtaaataatgtgatatgtacatatgcttcaacaaagaatagatcttgtcttatatgcttttttgttaaactgccataactgtttgttatgtctttgtgatatttctatcatgcttgtataattttctttttcttctttatcctttacctttttgaaaaaagaaaaacaaaataaataatactaaaatttttcttgtagaacgaagattaaaaacacatcatttaaacagaataaagaggtctcacatcgaatctcatctacttaaaagcaaagaatacaaaatcatacacagtacatattacagaagaatacaccctcatttcataatggcaaaagctagtagtaaaaagaaatattctggtataactaccaataaacaagtcgctgcagaaaagcatttaagttctgttttcaagtttaatactgatttaggccagcatattttaaaaaacccattagttgcccaggggattgtagataaagcaggaatcaaaccatcagatgtagttcttgaagttggtccaggtacaggtaatttaactgtaaggattttagaacaagctcgaaaagttgttgctgtggaaatggatcctagaatggcggcagaattgacaaaaagagttcatggtacgcctggcgaaaagaaattagagattctattgggtgattttatgaagactgaattaccttactttgatatttgtattagtaacactccataccaaatttcctcaccattggtatttaaactaattaatcaaccaagaccaccaagagtatccatacttatgtttcaaagggaatttgcacttagactattagcgaaacctggtgactcattatattgccgtctatctgccaatgtgcaaatgtgggcaaatgttactcatatcatgaaagttgggaaaaataactttagaccacctccaaaagtggagtctagtgtggtgagaattgaaatcaagaatccaagaccgcagatcgacttcaatgaatgggatgggttacttagaatcgtttttgtaagaaaaaaccgtaccatatcggctggatttaaatctagtactgttctagagattttagagaaaaattataagacgtatttagccatgaacaatgaaatagtagatgacagtaaaggtactatgacagacatagtcaagaacaaaattgacacagttttaaaagaaactggtatgggtgataggagagcagggaaatgtgaccaaaacgatttcttaaagttgctatatgcattccatcaagttggcatccatttttcgtaaatgaaatgatgaataatcaataataccgataaacaaaaccggattaattcacatatatatacataatagtaactatagatatgtacattagcgttaaataaaatacaactgatcagtgaaacttacttgatatttctaatttttaagaaaaagcaagatccatatcaaaccccatataattttacaattttgtaaatatatctctggaatatttactgatgtaacaatacacagatactagaaaacaaagaatatatgaatacttcaatctaatcagaatgtacacataattcatataaattagatagtattaattaatatccatcattcaagttcatggcaatttgaaacatttaatacaatcaatttgtgaatcttttgtgttaacaaaacaaagattatgtaaaacatgaatgttatttgttgatagacaatttggttttgtttaaacatgagacacccttccattacaatattctctttttccactctttcttcttcttctctctggccctctctgttctctttctcttgctctttttctttcttctctttctcttgcatccccacttaaaataagtgttaagttaaacatagaataaccagcaactaatactaaacggcctttgcacggctgatagataactgaactgagtctgtcgggtgagtggagaaagagggggaaaaactgtagcctttgcaattcttttttttctttctttcttgtactcggaatttccaaagttaatttaaaaggcaataaaaagaaaaaaagaaaaaaagaaaaaaagaaaaaaagaaaaaaagaaaaaaagaaaaaagaaaaaaagaaaaaaagaaaaaaatttgatcacagacatacaaacaatagaaatagatcaattgggaaatttaatgccgcttcagaaataaaataaaaaaataaaagaggtgcctttcccctcttttcttaaaaaaaaaaaaagaaagaaaaacaaaaagagaggaattcttcgagaaatacgaaatgtgaaaaatttctatgaaaaactcatggttttgctttgatttttttttgtttttttttgtttcgagattgacagaaagaggggaaaatgataagaaacagtgcggtagtacacgtccgctgcttttttgtttttgttttttttatttcttttcttctcaataaaatattactgagacaatgacaaaaagaaaaaaaaaaacaaaagaaacgttttcgaaaacgactcaggtgaactttctagtagataagtattgttattgacgacagggcaacccataatcttagcattctcagcatactaacaggaggttctttccgtaattacacaattttttttctctatcttactaatgtgctattatatgctctctattattgacctgctaatttctttgttttttttagcatgcggatttctatttatgctattcgaaatttacatattttggtcttctttgtttctgtgtttggcgtattgtataattttttagtcatccggaaaaatccagcagccgttttattttagtcatatcaaaatcaaaatcggaatcaaaatcaaaaacagatgacccttcttctccacttttgactcctctcgacaacaacgaccacaacaacatgaacaatatgaacagcaataaatggtaacaatagttttctggtttatctattcttcaaatcataatatcactgtttccaattgttttcgtttcttatttgttcacaagcttttttcccttctgaatctttatatacctttcgatagtattactttaataatcacacattctaccaggattcattttacatatattctttaagaatatatacctatatatatatatatgcatgcatgaatatttgttgatagctttgcttcttcggatctgtcaactttgactttgtctgattttaccccttcaaacttactaaataatatccaactattctgttgtatagtgaaagaaaaacagtaatcacaaaatttcacacaattaaataatgccacgtagaaaaatcaaaccagataacacttctgatatagaaacttatgagatggacgacaataacagctttgttaaaagacatggatcatccaatgatttagattctatagaaaaaaatgataagaaattcgatggcttggttattgaaaaagaagaggaccttataaactatgacttggaaagaaataattccaatatctcttctaaaatacatgataactctgatgattacctttttgatggcaaaaaagatgatgaaagattgaaaaaagatttgaaagcccgtcatgtctccatgatcgccattggtggtgctcttgggactggtttattgatttctaccggtacttctttggctactgctggtcctgtttctatgctaatcacatactcctttgttggtagtctggcatttttcacaatgtcttgtcttggtgaaatggcaacatatattccattggatgggtttacaagttatgcctctagatactgcgatcctgccttagggtttgccgtcggttatgcgtacttaataaaatatttcatcttacccccaaatcaattaacggctgctgctatggtccttcaattctgggtcgatagagatagagtcaatccaggtgtttggataactattgtccttgcagtcattgtcttaattaatacatttggggtcaaattcttcggtgaatttgagttttggttgtcaagttttaaagttcttgtcatgttaggtttgatccttcttttattcattattatgttaggtggtggtccaaatcatgatagattaggttttagatactggaaaaatccaggtgcctttaaagagtattcagataccatttctggtgacactggtagatttgtcgcttttgtcgcatgcttcgtttatgctttatttgcttacactggtattgaattaactggtattgttgcagctgaggctaagaatccaagaaaaaatattccaaaagctattagattgaccgtgtatcgtattattattttttacgtggttactatcttgctgttgggcatgtgtgtcgcatataatgatccaaaactgttagaagctagaaagaagagtacatctgccgctgcatctccatttgttgttgctatcgagaattccggtattaaagttttaccacatatattcaatttctgtgttctaatgtttgttttttctgcatgcaattctgatctgtatgttgcctccagatctttatattcattggctattgataataaggctcctaagatatttgcaaagactaacaagtggggtattccatattattcgttgggtgctagtgttttattctgtttcttagcctatatgagtgtttcttctgcttcttctaagattttcaactacttcgtgaatgtggtatccatctgtggcgttctaacatggattaccgtcttaattacatacattcgtttcgataaagctgtaagagcacagggaatagacaaatctacctttgcttatgtagcgccacttcaaccatatggagcctattttgcgctattcttctgttgtttaatagcattaattaagaatttcacagtctttttgaatcatgagttcgattacaaaaacttcattaccggttacattgttctacctatctttgctgcttgttatttcggttataaatacttgaaaaagacaaggattattccacctgaagaggtagatttatacactttcaaagccgctattgaccaagaggaagaagagggtaagattgctgatgcagagttaaaggaaagaataaagaatggtcacaaaaattgggagtggttctatgaaaccttcttaggcaaaatcttttagttatgcatgcaaaaaatttcatttcatttcattttaataatactctttctctatattcttagtatatatgtaaagcatatctattgtaattatataacaaaagtaatatcactgaatcatatgatttggctatttcataatttactatttgactatctcataaaatctaatcaagctgatttgtgtgcattattagctaagttaatttgaggtacattttagtccaatttttcatataaaaaaaaacaactagttttcagttcctaattacgcctttttgacttatctacgtaatgcaaattaaagaaaagatgaaatttcttgacctgatcatatattttttttttttaaaaaattatacattatatagctccacaacattgtcatgaaacaacaccacaaacttaagatgtatttaacttcttaatgttatatccttttttattttttttatttattttttttttttttgatatcaaattagcattttaaaaaaggtttaatttaattatactgctgtgcatgtatacaaggagaaaaaactgtaatctttaatttactgttcctacacacactttaaaaaaatcagatatataatttcaaatcaaaggtggaaagtactatgtattcctttcaatcataatctactctggttataaaaggattccttattatcttttacgataatttcacttaatcttacgtcggttttatcttgcttaaaagtaaaacaaatcaatacaataattaacatagaagaagaaaaaaagtgaatgattgaagctctgcctacgatttctatccattctactttcaaattaaagtgattctatgttataaagtacactagtgataagatcattatttaaaaggcacaataaacttgatgcagatatctatttatcctacttcaattggttactttttctgtttttctaatgtttgccaacacagaataaaatgtactgacaaagcaaaaaccagtcgaatagtggaataataacaaaagaaaaaagaaggagtttgtcttgtatagattttcaaaatagtctccaccccctctttaacactttgacagtatagaaatcctttacatcccaatgctccagcctttccctaaacaaatatttttcaccactctctaatcgattctgtgtgtaaagcaacagtctacactatgcaaacaaatctaagtttcaataatctttctctgtatcacccccgaaaaattttcttttctaattttttttttttaatttatgtgtctttaacagaacataaaaagtggagaaagttcgaacaattgcttacttgctactaaaataatacaacttaaaagcatttagaactatacaacctacagttcctgatcattgaaaaataatataaaagcacaaatatccatacacttcgaatgatgtgactatatatttttgaataagagatcatatgattttctttttttggaatatttcttacagtatctaccttattgccatcactaaaaaaaggcatatttgagcttactacatcaaacaaactgctttattatattttactttactttaataatggatatagcaatcagactgcatgatgattatgaggaagattatgtttttgagattcaaaaagactttacagttaacaattatttaagaagaatttttgataaagatggtgaattagcaaatatcttaccacttagaccatctatatttcatgaaaaaacaccaacaaaattctataaatctgttcatccaggtattttaacacctggtgggtctattttattcaactttgattcaacaaaaaatgaattcttaaaagaattggattctaatgtacctttaattcagcaattatggccaggccagttaattgtaccaaactgggatgttgcttataagaatattatctactatacaataatttgctttttatggctatatacagatttgccagatttcatttcacctactcctgggaattgcctaactaattatatttcgtgggcattaatcccaataatgaattatttaaataaaccacagctaagtgaaaaattaagaaaagaaatccaacccaattttagcagtcacaatacccaaattatcttctttgtgttacatattttaaagatacttttcctaactctttttctaggtctcggaatggctaatccagtatcatttaatttattcaagattagaaatgcaaataaacttaaagccagtaaaaaattttttattgaaaagttatacaaaaatttgggatggactggtttgaaaaaaactccttatgaattgtataagaaggaatactatgagcatatcatgaaaaaacatggaggtatgcttggtgcccacaagatcggaaagttaaaaagagctgttaattctggtattatactaaatagtggagaagggtatagtacgccaatcgaaaataccattagtactttcaaagcaatgaaggaaaatcagaaattcattctttctgaggtttattttcatcaattgaaaaaagatttagaatcaaatttaaataaatgtgcaggagatattgattcaaaaaatgttcttatcaaaaattataaaagacatggaaattttgaaggaagtatagaaatcgagaatattatccaattaagggaacagttagctagtaaattttatatttttgagcaattggaaactaaaaaacaaaaataaatgtaaagtgacactatttttgaatttcttgagataaattattgccatttttatttttttttaaaaaagaaaacagagactgtttgtcaaagttcgtatgaatattaactgtaacacagttacttctataagatatatactttgaacatttttatatcttataataaatataaatagaacctatatggttattctaccgaagtattcaagagtgaataatatatactgaaataacacaggagaaataaaaggggaatagtgaacttttttcatgatgttgagatattacctagactcaatgaaaattttgtgaaaaacttttttttttctcaaaattaactttctgaaaagtacatatagtcaagatatagaaattagaaataatttcttttactcacgactttacatacgtaatgcataattttgtatataatatatgtattatttaatactgtgagcgagcacttataaaaatacggttcataaagttccgttataacttataggttattactccacaccttttaaatttcaacgtactttctcctattttttttttcgtgattttcgttcttgtgtgttttccacggaaaaatcttcaaaaaaaaaaattcaacgaaaaatatcaatcggataagataaacaaaaaaaaaataaagtgaggtaaaacaaaaattaactacttctcatctttgttataatcagaatgtagatattaattttatggtcactattagagctacttgtgaccaaagtaagtgctgctactacaactatttcaacaccaacaaccttgtctggtgatcaaacgttttctgatgatatcgtaattgaatcaggggctactcttgcattagtatctggttcatcatattccttcaatagtagtattgatgttaaaggttctttaaacattgttggagattcaacaaaagggttgattagtctacaatttagttctactacaacaattacaaacagtggtaacgtcaacattgagaatattagatcaacaggttccgctaatgattttgttattgtacctgcaagtatagataactttggtatatttactatctcacaattaaatggtgctgccaccatcccaggtactaattttactctagatccaactggttccttcattaatacaagtactattgactatgatacagctggcaaaggaggtactacaaatgggttactttatcttggtaccataacaaataatggtgtcataaattctggtgggttttctggattgatacctaacccaagatttcctgctcgtagtagatacaatatgaaaggtcttgtcttcaataatcctatagaaggtgaaggtgaagtcactggtactaaaggggctataattttttttaatacggacataattgggagacaaacgttcagtgtcaacgagaatatgtatattattaatccaaaagttgtaccaagttcgtttaaagttgtgaatattatcggatcagattttgttttcttggatatagactttcagacatggagctccaaaaatacgggcacgttgaagaacattgggcagcttaattatgcactatatggtcaccgttactggttaaatcgaatttgtacatttagctggacacaaacgtatgtgagtaatattcgtattattacttctgatcctctttataaattcaatggtacttctatatttgtgagtggacatgaagatcaagagtgttcatcactatctgaaccaattaccaagacaacatccgttaccaccatggattctattactaaagctattactatctcaactttaacaacatctacacgcaatcagtacttccataccgtacctgaatttatttatcaagttgctgtacctccattatctactatctccactacttttgctacattggtcaccacttctacttcaataacatataccacaactgttaccgacacagcaggatctgtcactgaagagattgtagttgttgttcaaacaccaccattatctacatcctacacaactataacatatcctgttactgctcaacctcatccacattcacagcaactgttaccgatacagctggatctaaaactgaaaaagttgttgttattgttctcgcctcacctccatccacttcctacaccactattactagtcgattcgcatttccaaaaacatctacctataccaccacacttgttgacaacaatggttcttcatccccagaagttgttgtggttgttgtcaccccgcctccactcactatccacacctctactacttcggacatcgaggaaccaactaatactacctacactaccacagttcttgatattcaaggctctccatctccagaagttgttgtggtttatatcaacccatctcgatctacctcttacaccatttctactgcagatgttacagaaccaaccacatctgcctacacaaccaccgtcactaacagcaacggctcctcttctgccgaagttgttgtggtcacaccttctccatccacctcccacactacaactacaagtctagtttctgctccaaccacaactacttacacaaccactgttattgacagcgacggctcttcgtatccagagattgttgttgttgtgatcaccccatctccatttaatagctttatgacatcatcaatttctgtaccatctcctctctacggaaactccattatttctggtgaaatgactgaatctgctttgactggcactctagttgttttgactacggttgttaatggagttactatgactacaacttattgtcctgaaccatctgcaacttccaaaacaaatatgattactattattggacatagttctattgagtcagtttattcaaagaaccaacaagaagagactaactcactttcggttgtttcgaacgcaactccagttatttctattgcttctaccaccactggtccagcatttaccaatggtaaaaatcacccaacatctagaaatcctagaatatctaccactataatcggtaataatgagtctagaagatcagaaacatcgatgccttcaatggtgccgcaagtttcccaatatattcctgagaaattatcctcatcatcgactgctgttacaatacctcatgggggtataccttctcttgtatcatatgaagataagggtggtactatgtacgtgaaatggagtgttgcccattgcattagtttattattattcttggtaatttaaattgattaaagataaaaaattttacaataaagaattctaaataatttaataattaaatatttctatataagtacatagtattctaatattttttatattgtgtatttttattatttatttgattttcaaatatcttgtacagcacaaatagatttgctcattcctaataaaccgataatatcttctcccaattttaagtaatttagattattcaatacaattatacaatctaatagttgttatatagacattttaatacatgtatatttttgctacatgttttggcaatttttaataaagagattgtgattaggaaatttacttctgtatatatcgattgatcatggtttaaaggatataaggtctttaagccttttctaattaagaaaaattgtaattatgaagatttaatgctagtttaattcaaagatcataataaaaggtttgacacatgtcttaaaaacagttacaatctttctttacctgcatttactgaaaagttaactagataaatgtatttattcccacattccttaattattttctttctgtcctctgtatatacaaatacatccatagggaacacataatacatacatatatacatggatatactttaattaaataccactatatattgctaggtcaaataactatatatatatatttgtgttaatatggtcactgttattaactcgcttaaacttatggctatacttctatttctttttttttttgtaatatagtattcaattgtacgtaagccaacatattcaataactattatattcacatgaacagtagagacatgctatagaattactctaacaatatttaaagaaatggaaacttcttttaagtagcaaagggaaaaaaagagaaataagacactatttcccaaatgtacagaattgcacactgatgacatattatacttactatatatgttaagaatattatacacaaaaatgtagatacacagcatacggtaacagttgtactttattgatccattactgtatcatatctcttcctgtattttactgaatgtagagatttcaaaatttcaaaagagacaagagaatttctctcccacacttgaaaaatatcgtgataataattatcctaagatttcaataatataggaattttctttttaaatatggaacatgtaacaatgttataacacattcatatttttgcaaatgttgatccataattatagtatgtcttgttattttaatgttataatggaattaaactcctatttttttttttttgaatttcaatatcttctcatgactcttggttacaattagagatccatacacagtattaaacatccagctataataatgtcagattaactcttaaagagaataaatttcctgaatagtaaattgatagattaacatgttaatactccaccatagtatattcttaaatgttgttcaatgttcaaagatcgagataaaatttctttttattacgttatttttcaaacattaaaataagatcatttgagtaaaagatagaacaaaattgttaagcagggaaagcagtacagtagaatgaaataaagatataatcaaaatattgttcattatatcaaatcaatgtgtcttttatcatcattaccataagcattgaaaatcaaacataaatcaaatacatccataataagattggaattagtaaggataaatatcctgtaagatataagtaaaaagatgatatagtaaatttgtttatggatatagcataattgtatctatgtttataacagttatcatgatgtgctaatttcaaaaggctattttctgtgatcataaattattataacactatcattcgatggataatgaagtgatatagaagatataattatatttttcatattgaaaatattagtaagggatagtgttcatgtgttattggagaattcttaaatagtcatatttattatgaaagtagtagtataacagtaaatgaaagtggtatttaataaatagtttccctagttacaatatatgtatggagtaagttcttttgagaatattctctatagctacttatgaatgattattaagtatacagtggtgtaactataccatcttaaatagtggtttagcaatgttcaaagttataccatatagtaagcatatcgtaactgtttatttatggttatatggatctgtattttatatggttgtcgatgggagtggctattattgttgttaatttttttttcgaactgttttttcagattttgaaacaaggaaaattgacaattgaaatttgaatgaaatgagattggtggatagtgaagagatcatgagagctgatgctaagagtaattaagtgtgatatgtttgtgtggtatcgtccttgtctaagacataatatcaagagaagttgtatattaatgaggagttcatagtttaagagtgataccatacaatctaccagttattaatgtccaaatgaagtaagcagtttaagagtaaagacataattgaaagaaatagtggttgatatgaacttagtctactatgtataaatctatagtaaagatacatgttaatatcatgatagcagatactgtgaataacattgtatgttataggtttaaaagagcaataaaatttactagatgatatcacgataataaacatagaaatgtgaccatatatgtgagatgtaatagaataaccattgatgattcagattaatccagtgtattaagtttacgttgtttacatcttttctacattctacatatgaaaagagaatggtcaaaatttattgatctatttatcataaaacaaatgactctatcgttgttatttttattgtttcgaaaattgtggttcactcatattttgtaatttaaagaaagagatagtgatatatatgtttcagaaactttttagaaagagctcattgttttgcttaccttggtatagttggtggattaaatataaattgttcatataatcatttgacatgggaaataatttttgctctactcatgggaaaagatatcttggacagtttttagagaattatgagaaatattctatgcctaataatacaaaattattttccagaaaacaagatcgattcaaaaacaatctacatgttctatatgcagtgaaagccacaaatttgaaaaatctgcttacgtttttcatttcaaagaagactttgataaatagatttatgttaaacactataccatctttctactgtttatgatcaagcatttatcctatgaaaatatttaaaatgatatttaatttaaataatcttaattgtttatggaaatatagttttgtagatttaacatttgggattagagtcttagggatgctaatatggtatctcctgaactatagtagacttaaagtctaacgttgttatgttttaagtatttagtaaattggatttctcgtttattgaaaacccatgcaaatagtatatattgtatttattattaaatacatattgatctttcacaactttacttctttcaaaaaaattaccaacgatctaccaaaatcagtttttaacaaaaaagatcttgtgaacatacgatatattgtctaattatattatattggactcaactatatcataatccaatgttgataattatccctacgatctatcaaactggatcaaagacctctttaagtgagctttgatataaaatttcctacgtggattatttgataatcgactacaaaaactcacacattctaatttgtattattgacaacatcatttctcttatctcatcatgtttcagaacatcacacgcgaggattaaatagttacaacttaataaataagtactcataatgaacctttagagcctagcataatttttccatatttgtaagttagacaatcaacaaatattattattgttgtttatttattaaaacaggtctcttagcactgtggtttgaaatataaataaagatcacttctctggagaacttgtaacaactctttatttatatataattacaactgtagatatttataagtttttgtaatgttttgggtcgatcttctcatcacaagattgtatattaaggtattcatgaaatcggatatcttgcttcaatactatttacaaaacgtgaggaattaatactagctaaatagatataaacagaatataaacaacaccctaatacttttgattctcaaaaaacttgtgttttaacaacaatacagccaaaacagcataaattaacatattcaagacctcaagaactataaatatacgaagaattgatatgacatttcccaaactttcatgatgattaaaccaaatgcaagaatattattgataaagtattgtcaaaaaaacataaaagaaaaatcaaatattccccatcataccactttaaaagtgttcttcaaaacaattcaaaaaacaaataaatacaacagtaatataatcatagattcataaaaacgaataggttctttctgttttgtcttatccttgtagaaaaaaaagattgataaaataattatctaatggttgctattttgtttattgatgtttaatacaagattttacaaaatatattatcgattgttacgtgtctgcaaatactttcatgtaatggaacttatcctaatgttaacataataattttattgttaataagatccatagggatataagaaatttataagatgatgtattgtcgtgataatgaaatacattcacagatatctttatacattcatgttggggatgatatccgaaggtaattcttactatagaataaggccagcaacaacaagttaaaaactatatctgagtataaataagagtgtttgtataactaatacagaaattatatcaattacagaaaatgaattctttgacaattacccatatacaattcatatttttattctcaagagtactatggtatagttcatttgaaaaagttatgacaactactgttctagaaaattaactgtcagaatgcaatgatctttccaaactcaaaaataagagagaaggaaatactttcagaaatagttttgtggattgtgatttctttgaataatagtaatagtcatagcatatgaataatcattctgtaaattcatagttgcctctcccacacctcacattaacaatatatattttattacagtatattaaagttgttaagaattggcactcgtagtcattgaataaatagtaaacattctcaatactgtaattggataaatatatattacaaaattgtattaaagttcttccatcttcttctgtatgtataacacagaaatgataatatgtgaaaagtatgcgggagaagaaacacgatttgaaaaaatgttgtctttgtgtatgttaaattttgttacttctcttctatgaatggcaaaaatcaagcaagcagtattattaacattttgtgacatgtaagcaacagttcctcagcattccagtggtgtcatatgttggaatctcattgttccatttgtttcattctcaaatattctatttcgacgacataataaaagtaacagtataacacagaaattgttaacattcaacaacaaataatggagttataaaaccacaataatttaactgaacattaataaataatccatatatactaacataatgaaagtttaataaactagcatagcaaagaacactttaaacagacttctatccagagaacttgaaatgctaatgtactttatttaatagttgaactatgataatatctaagaaggtatattgatattttaaaaacacaacatatattatcacactatgaatatataccaatccatgttagaaataaaatacaccactgcatattgaaatccggttttctatttaatgaaagttccaacatcactatttagagataattactacaaatacactcttctccttttcttctcttaatctacttttcatctcatcgttgatggaaaaactgctgcagcaaaaaaattctgtgatgacatcgagaaaaaatatttaaaaattttaaaaaatacaaagcacgtaactgtgttttgactagtatatttctttgtgagtgttaagtaactagtttaaacaatgaatgctacgattagaatatatttcatgttatatctgctagatttctccagtgtggttcactctatactttcccactagccttttgaaagtattttctgtttatttactgtacactagaacgaacgagtatacaagaacactaaacacaacattctaagaatgacattgccaatttaaaagtatattagaatatcaatcacccaaggattgaagaacaacccggagtaatgactaatgtgcatacaatttgaacaattacaagcaacaatatttaatacatatattttattgtagttaggttaagtcatataaatattatttctagagactgtatttttgtgatattgcataacaaatatacaagaagtaactaatgtgatgttcctaattgcatattccatttgatgaacactatatagggttcttactggttcaaccaatcaaaaagcaaagttgtactagatgaccatattgtaatagaactagttagaatattcacaagtacgtgccacatggactatttgaaatattgtgtgttatttttatcgagcagagttggtttcgtgcattcttaagtattatacttatactgtattgaaaaacattaagatataagacagctgacaaatataatagtggtattctataataactacttttttattgtggaaatttcattctaatatataacaatagaagtaacatagaatataaggtataatgaaggcgtgatactttacaaagattagtaaaaaagtatggaaatatgatgatgtatcagtggtgagaagatacgtttatccaaaggttataatattattatgaataataaacacagaataagttatatgaaacaattattcgaagaagagataatgtaatatatctgaatttcacgaagcaaacagatggatgtgaaaaaatagtagtttggtaaagttgatatttcattgtcatgataactcatgaaagagagtaagaaatatatgttgaaatacaatgataagaaaagagaacttctaagaattaaataacaaacaagtgaccaatataaaaggggtattaagatgttataagagatgataaaataggatagataaagtgatactgttagaataagaaattgattggtaaaagaattaataatagtgtgctaatggagatcattgtctatttataaataaaaacaagatttaaccatgaaatttttgaacaatattagattctcgtgatcatgctttttgaattttattgaactaatttaaagaggaaatacatatagaataggattagatataacatagtaagaaaatattacagagtgtgagtgtggtgtaaactataacatagttgagtatattatattttgttgatatgcaggaattagtaaatgaaagtgattgttgattgcgaatgcacatgctaattatttccatatgatataaaaagatattactatgcaaatagtatatcaaaaaacaaaacaaaatcctaattcaacaactgtatggataagaataattgtatattgctagattgtgataaagattaaatcatataaacaaataaagaattataaaggtgttgaagcattttcattgtcaattaaatttggagataatatactggcaaaaaatacggtaacctaagtaagtatgtattgttgtgtgttctggttgttagaatcatattactcttgtgtttcttgagatgatatttcagaacttgtaaaatattattattaaaaaatgaaaaaagaagtggactataaaactatgaggaagtaaaaataactgcaggagtggtagtcgcttaataagtgcttgttaatagaataaaacaaatgtggttgatatattgcagatgttgtgatttagtttgacacaacagatctgtaatatgaagtagagtgtaaggagattacattcttgatattgtgataggcgtgaacactaaatgatacttgtatataacgagaaatgatgatatatcaatatgtgatattgaaattgtactgtatattcttaaaaattaatatttaatggataatggtaatgagagagacaaatatatgtggttatatgtgagatcagtaataaaaagaatgttttagagtgtactgttgagatagtatttccagtaagtgtgaagtggaaatggacattcaaaagtaattatataccaaggtgtacatatatttaaataacactactgtgttgtcagtagtatcttatgtatataatctagtattagtagtctgcttcatacgatatattattcttcacacacatggatcctcatactattttataaacatatcaatactgtcaattgatatatacagctccttatatcataatttattaactatccttataagatatcttaattattattaaataacagtacttactaaatatattatgccttatggacatataggtttatatatgctgttattgtatatattatagtggtatatattaatacaaacgaacatataataagtatattgattaatatcccattgaatatttattataatatataaaagatatatatttacatagagttgaatattataaataggaattaggggataaactaccaggtaagctaacaacttttaagtctgaaacaagttgattcgataatatatatataataattaaagagaagacgtgcagagaatattattcaatcctaacacagttgtattttagctagttagggtttgatttagttattactattccatatagagaatacttctaatgctagaatttcatgaagaaactaaataatagagaaaaatgaactatcttttacacaccatcatctcactatttatacctcatataaagtgacttgtccgttctacttaatgattaagaaaatgtataatataattgaccttgttattattttaatagaccctttatatggatttctatgattcattagcataaagtatatattatccttaaattattattaaatacaatatgtgtttataataattttaataaaaatataaatattcttgatatgtttaatacttgtaaagatataaattattatatacaataagtaagttgaaatgcttgtccaaagaaagatcgctaatgttaggtatgagtaaatatgattgttagatcacgttgaaactcaactactgttaataagcttaggtactagaactgtcacaacatatacaattttccatatcatttcgttacgactaacagatggagagtacttaatgatgtaatttgtgatggtattatcagttagtgaacaagaagatacaaaattaaacctgaagaaataataaatatatgttaaaattctagtaatttgtatagtttattaagttttatggtataagtattttatatatgtataaaaatagtttagtattatttatattgtatagcacagcattgcttaatatcaaaatatgatacttgatcagacataaaatagattgctattatagggatatactctgtagaagtataataatttattatatgtacaatgaaagcatatagagatgtagttaataaacacctatatgatattagtatggaagaatcaacacgtgatagtatagcatttgttttttaatagataaatttaagattggaatatttaatattatattgatattcatactatgcaagaatcggtttaaaataagtattaaaaactttcaatattatatgaagatataataaaagctaataaaaacaaatattatagaaatagatgataataatatgtgagaattagtataataattattactgaatattgtagggatgcaatgggattgtattgaataagaaaaactatagtgttttacaaagtagttaacataactcaggcagcatttttaatagaagaacaatgatcttctattacgtcattcgtattcacatatctatgatagactacttggaaatataaaccttgttgtggtttcacttcaaagtatgttggaagagctgttgggaaatggcgttaatagtagatagaaactgaacttttacgaaatgtatacagtggaacaaaacagtaaagatgaagattgggaaatatcatggtgtatgtgtcttgcacacaccgataattgggttcattggatccaatgtgatacagattattaatttccactcttcttttttgattcctattcaccgttattacttttctatcaggttgcagttgttgtatcgtaaactactatctatatgagtttgaattaactatatttgtatatgatagattacaccactttagaagtttcaagtgttcagtgatatgataccaaacgctaccaattgtgataaccttatgattattaacttctgataatagtagacttggaattaatattaatagataacttggatagataaaagatgtagactcactctatatctccagacctaataataaaaatgtaactttaccaatataactaatattaactaagtaatacatactacataatgcgatccatgatctaacttaacactttttttagatctcatatttaattaccaacaattattaatagttaatagctacctggactcttactatatgcattatctatgagacataatagaagttattgttgagaattagcacctttatgtattgaataaaccagatatattctcaactgtattctatgactattatgtaattatttgtacacagaattatagcaatgttctttactttttatgcagaacatgcttttaataatatacaaaaagtgcaaataaaattaaggtacgatacgaggaaatctttagttttatttatatggacatcaagtaattttcctccacgaatagtaaaatatgtacaaatagtttcgttgtttgttatctgttataatctcattttttctatgtatttcattctggaatattttatttcaagagaataagaaaatttatctaagatgttattgacactagcagtcatatgttaattcatggtctctgtatcaaaatctttttaaaaattattataatattaacatgatgaactgatataaacttataatagaatattggtagtatgatgagttctcagtttacttatagtagggttggtggtgctgtaaatttatctcatgttgcttagttttttattctacataactaaaatacatgatattgtgtcactcatttaatatgataaatttagattactaaagatatcttcaattatatttcaataagccataaacacagcaataccctataacaccacgacaatatctcactagtcagatttatttctacacattatattctcttctctctatcatacatttaatattttaaagtgctatgtccattaatacacctacttttactgacatcccagtaatagctaccataacattacactacctactacaactatcactttgcacaatactatcttttattgtgtattatgccataccatagcaaacaatatagaatagccacttattcattcttacatgacttttttgatctatacctactagttggttaaaacagcactgtttgtagaactgtaactgccaacatatgctaaaattgtcttcttatcttttcattctttttcttttctgaaatccaatttttcttaaattccaaaacttttttcaatcaaataaaaacaactcaaacagatatcaatcactgcaccacacaaacactgatgtaaacaatacaaaggaaacctgcttacagacaagaacacatcctcagttgagatctatgcatttcacaaattcacattatataacattgagatactaccattcaacatgatataattatgccataaatatatttgatacagccaaccaagatatccttaactacagagagtatattcacgacaatccactttgtacatgggttattactaaggaagatatttataaacaaaatacatctatctttatggtatggttgctctattgctatgagtatttacaaatacataaacacaaacacttacagtatcttccccctaaatgatataatctgataacatatcaatttcacatagtgatcacttcaatactactatcatgaaatctatccgtatatatgaacctcacagtataattatcaacactatgccaactaccatcgtactactacccaactacatcacaaatattgcattaaaatcactcacaaaaatacaccctaccaataaccaagattaaatttcttcatgaaaatttattcattattactgactgtcaagtggtaaaattccataacactgttgtcagttcttacaacaccaacataatatccaacaatcaacagtattaaatcaaataatacacatggatgaacttgtgaatatattgtaattaaaaacaaaaatggtttaagtgtgggatacacaacagaaagtaggttttgtgctgatctgtaggaattattttatctgagttaccatatttatatacaattgagaaaagtggaatagtgttcgttttgagtattactatcaaatgataagttgatttttcctactttatacagtgttatctaacttattcaaacaaagaacgttagtttagcttgagtaatcaatttacaagatgttatgagatatttaatacaatgaaacaggaagtttttttctatgaaacagcagctttcagcaaatgtctatcttttgtggataacaattaatgtcatatagtgtattaatgctatgagttatacgtgggttaggtgtaaagttttttattgtgcttttatatgatttcactctctaacttttgaacatatactgaatgatatccaatacagttacgtgaattatcctccagtcatttttggcttagttctctaatgaattgtacaacatcaatactttcccaattcaaatgtttttagttgtaattgctatttagtcaattagtggtagtgcaaaatcatctgctgttagaatattgaaatttacaatgatgatgccattagataaagaaaaataaatttggagacatattaaatttttataaaagtttataccaataccagtagatgccattcttgttggaataaaatttaccacatgatttattaacaatcaagttattttatttgtacatttgcatgtattgaaatgattaaaagttgaaatgttctttgatcaattaaaatttattgagattgaaaaagataaggagtgagaaagagttaggggtatagtatatagagacctgtttgagttggtgtattacataagccagaaatgtttaacttgttagatagtaagatgttatttagtatagttgtaatgatcattattgatacgttacttaatgattaaacaaacatattaatatataaattcctattaagagtataaaagcattctaaataatgatagctttcttggttggaatatgaataattaataatattaataacacccaaaatatattcagtaagtaatagtagcgggtttaattattgctcatatagattatcatctttttctatctcattgtcatagtgttatattagtattgggataatcaaagagatcattttaatataatgaattgtagtatcacaaataattctgttaaattaacacaattaataatctacaagtatgatgtttataatacagattatatttataaatacatcattggaagaattgttagatcatttataacagattaagtagtttaaagcatgttagttatgttcttgttctaatacttatattcatattggtaatattacagttaagatccaagatagcacacattttagagtagataacaacacagtcctagtataataattaataagttattatacatattcagagtttgtttatattatttattatccagaatgtttaaggttgcaatttatttcaagatttatgctgctatgtctaacaaagagtaataaaattatcagatgactgggatatgaatagaataaataatgttcatttctaagccataaaatacaattaatatatccatgtaagtttgaagattcattatttattcctgttatcatttcgtagtcagttgatattctgttcatatgatagttattcaatctacaataaaataatatgcaatcatttcttttagactgaagatattaatgggaagtgtttggatattcttagataatcatatttataaagaagttatatcattgatggatatcttccctaatgatggtatatgtattaagtaggttgtctatagcttaaaatattccagttggttgtattgagtataggtaaatgtaagatggcataatcacattatatcaaataatggtttgctaatgttcaaagttatatcatatgaaagtgagtggatcatagttgatcgcttacaaaccagtgtgtctatcctgtttacatatctgttggagtggttgttattgttgttgattcttgcaaaatattttttcgattttaaaaaaaagtaaggtgatcttggatgggattgatagtcaagaggtgatggtatgtgatattgagagtaatcgagtaaaatgtgatgtaatatatatcgatgatagttataaaaaaggaatatgagatatcagtataagaagacctgtttaaattaagttaagagtaaacaattcatcagtacaatttgttatgttattttcatttaatgtgaatgtgttttatatcgatggtaaatgcatagtctaacagtgatgttatagagttattaagtgaatagaaatataattaaagctagttggttgttaagactagttcagttcaaatagatgttaatgttgtaaataatattgtatgttatggaatgcattgtttcaaaaaaaattgtattagagatcgttagtgatattatcatagtaaacatggatataagtattaaacatcatagtaaattgcaatctagagtaattgtggtatgctatactggaatatgatatatcaatgtaatatttaatacagttattgaataggaataaagacagttcagagaatacagaaaaggtttgtgaaactgtattaaagtagttgtattatcagctgagaatgtatattcatatctagcttatattttatcatgatgctaaggtgaatacaaaatagttcaatacatcagatctctcttttaattgatgaaagatacttccatgttattttttttttgttttcatattttcattccttcatgtttgaaaaaaagagaaagccatttggaaatgcaaatttgttctgctaaattttcacaaaaacatttccacggcctcgaagaatttgtgattttctgtgaaattcaaaaaggggagttggaaaaacaaaaacaaaatgagttgttccgtggaaaaataaaggttccgcggaaaaaacaacatgggacagagaattgatggtgtcacgaagaagagaacagagacgtaaggaagggtaatatagagaatacatttggtaatgtatatatgtatcgagagctagagagtagtagaatctggtggtggttataaaaatgttgaaatagaatatttataaatttggaaaatggagagtgaaattattatgtagttaaaaaaagataggattggtatggaaacaactacgcgattgcacctttttttgtattaaatatttaagacagagtaagtgtctatatatattgcaattgttgagaatgagcacctttatttggatatatcgtaaacattctcaatattatattaaacagatttagtatacaaaattataataaagttcttcactttctttctctatatacaacatggaagtaataatacacaaagattgtaaataagataaaaataatgtatgatgaaatccttggctttatatatgttaacattcagccattttcctctacgaacagtaagatatttaataaacaaactcaacaacctttggttacctctcaacgattattacccaacaatttatcgtttagtgtctgctaaaatcttattgttctatctatttcattatagaacattctatttcaacacaatattaagcttagattcttcgaatatatgtaaaatacagcgatgatagtatgtgaaacgtatacaagaaaagaaacaaagtataaaaaaattgttggcttcacatatttttttatccatgatatcccttctagggctagaaaaaaatgctaatttgttttgtttatatctaccaataaataaacaatatacactctgcattttgatatatatttatatttgctgaaatataattggtctatctatttactccagaatattctatttctaaaaaaaatcatacgatatatttgttatgttagacttttttgatcctctatacacataccatttgtattattgtaataagcatagatggataatctttttatctttgttctttctttagatagttctttttttattgtaaaaagtttttcttaattcaacaataaatttattgttgtcaacaaacatttcttgtttaaataataaatttgcagctattataatataacacactttacaaaacagcaaagtaaatgtagaattattgttaatatacgataaaatttttatttacaaacttaacagtcacttttaaatcagtgttaaagagtttcaataaaacaataagtaaatccatattctggatcatgtgttgttttcatatctccgttttttacagttttttttctttttaaaatttgtccactaccctggtgctgttttattatcattgcaagacaactatcagatcagcttcaaaaagtatcgaaattgtaaccagatagatccatttaacatcttatttttgtctatttttcctttaacttaatatacagacaaaagaattaagaaagtattgcacctgagaaaacaaaaatgaaaaaataagagtgcagattaatttattttattgccattcaaaatgaagtaatttggacaaataaattagtatctataaatcccaagggtatattgaacctaaaaaaataaaaaatttactggtccttaatataatcactgccttttcacgattacataaggaagaaagaaaatgccttgtattattcctattatagcaatatttttaatgtaaagattctaacatcatctatcctctagatgaataacattagtatacatgtctttagcgtcggtgatcatactatatgttattattgtgtattattattatgttgatatgtagtgtaatttttcctcgatttctcaattgggaattaataattatataaatacaaaagaaacaaatgatagaatgtatataaattatccatccatattggaaattaataagtaaagtcgtctacttatatatgtttaccttttggcaatttttcataatgtattaatttattttcattctgtttgatcttatctctgtaatattgaatgtgcagaacaaatatttttcctctttgatatattctcctgttttgcaaacaggcgatatataattccagcatattaatgacatatttatgatggtattataaattagtaaacaagacaatacaaaataaaacctgaagatataataaatatatgttatatttctagtcatttatctacttaaagatgttggtataactattttacgcttatataaatacagttaagtattatttatattgcataatacagcattggttcatgccaaaatatgatacttgatatagtataagataaatagctaataatttattatgagtagttattactatctttctagcttaaaagaaccattatcattagattagtgattaattgtacttttaagagatgtgtgtctatatattgaataactataacttagatataaacaacactcagtgcacatcttagtattatggggatacactctatggaagtataataatttattgtatgtataattaaagtgaatagagatgtagttaataaacatatgatagcgtagcatttattatctaatagaaaaattaaaaattgtagtatttaatattatacgaagatatagtaagagctaataaaaaatattttagaaaaaggaaataatattatgtaacggttaatacaataattattatttaatattataagatgtattaagttatatgttaaactagattaactctagtcatttgcatgatatttaatgtaccgtaagtaatattttgattgagcaagattcaagttgttcccagttgtgacaactctaagcgccctttcaatatggatgagttttaaaggtagtattaaaatggagttgcaatattagccaatattcttgtagtatatgagatttatcaaataaatattcagaaaagaacatgataatcgaaacatatgctattcagggatgaaataattagcctatattatgtttaacaaaattaggtggtaaggcaacagagaatctttttttgaatatatatgaaaacgaaattttcaatttgggctggactagagataaaacagttgtgtaattaagtaattcatacaacataatatttattggatgaagtatcaaactataattgaccacttattaaaggtaacatttatataaggaagataaaagacctgccactttgaagtattattccagatgctaatgtaattttagattaatgtttggtaatttctttctaaaacacatttatattctatagtagcagagtatagtatttattcaataaaatatattaagggtgatacttttccagtgaaaaagctgtaggttttttaaggttaataaaataaaaattatttatttaatatagttctgttggaacataaataattttaaacagattaagtaactaaatttggaagttcccatattaatataaataattttgattagtatgattaatcagatggtttatataatataatattttataaagggagttgtcagagaaaagcaggtatatgaaggagaggattgtttacttatatcaaaatgattaaaagtaagaagaagtattaacaattatcatggaaagatagaacatttgatacttttatatgttagtagcaacatattaaaatctgtcatcaacagtcataatatgttatttggcttgttagggttgagatatgcagataatatggataggttttaaatgtgagatggtgctataatgtagaattctatagaaaaaagaagctataattattaattattcatatatattcaatatatgatgtagaatatcctgtttgttacaagtgacagaaattgttacggtagataacctaactattatctcctttctgtatataatcatatatgggtaataataggtcgtaatgataataatattatttaatttaggtagcttaatactggaagtaatacaccagatatattaataacatttccaagaggtaccgtaaaaagatttaaataggctggattagtggtgataccttgaattgatcacatggggatgatagtgataatgataggatacaacaggacatggatataattgatgtatacatctctgtgaaaaatgtttacatcattatattgacttagtctgggaatagcgagtggctgtatacacagtaaaatgtaggaggggaaattatgaagattggtagagtaaacaaaataaatttgtattatatataagaatataaggaatactactttctgaataagtgaatgtgtatttaataatcagaataatttaatttaagttttaaggattcagtaaagcaacatataaattaagaattaaattgcacgagagagacaccaggtttaataatttagatgttggaaataatagattaccatttgatatatttgatgatacatctaaatatttgataataataatactttctgtccttataattatatataatgagtgaaatacatagaagaatattaacaagaccacagcagtaacttcagtttaactaatgtatatgatacctggagacacttttgtatacaactgaaagtataattaagcaataaagtacgtagtataaaacagttagaatatttattgtgctgtaattcttgtttggtgttttatttcgtttattgacatatccatgagaaaaatatcacaatgtgacacttttaattatcgaattaaactatgtgttctactacttgagtataaaaaactgtttttgttgagtttaattataactaatatattctccagatgccttaagttttatattattttataatatgtacataaactatttcttgcttactactaaacaacacagaacccaaatgtgttttgctagtttggtttttgtttcttaatgtcaactgattattatctaaacttactattgagattgttaatcatttgtagatattgctattattagtattcattgtgcaattacgccttctgatacatttatttatcaagattattgtgtggatttaactacaatcttaattacacatggatttcattccaataagtgattaaatatatcttttgataattctttatatttacaccggtgtgtgatatagatattagttatcttaactttgaccattggctaaggttacttttgtagtctgttaaatgaatatactggtaaagtacacatacaataaaatacatgttatatcatgatgtaaacaaatggttgatttaatgtataaggagtaatagaataaagaattaaattactaagtacagataatccaattctcaatacattatattaataattggggatattgtgtaaagataagaagaaataggtaagagtggaatttggtatttttagaagtattgttagtcaaagatacatattaataaggtaaaagaattgttgaagtaacttgaattatttgactagggttgatatatatggaataagattgttataatatcgaatatagtaattgtaaaaacgttgttgatttagtgttggttatgtaatattcaaaataggtaagatgattgatatattatattgacaatttactatattatggtaatacgagcaggtggtgtaaatacatgatatctaaataatattaagaataataatggagtttgtaataaaataaagaatttaaatagttctctaaatataataaacaagtggaatcgatgataattggattaatgctgtgggagaaatagtaagagcagatataaaaaagaagtgtttgtaatattgacataacaatacagaatatttgaatataaggaataaggctgtagaatataagaaacaatacataggcaggtaaagaaaaagaaggcaagaaaaagaatggattttaagtagtacgagtaataaaagatgtaagttaaataatattaatgatgaggtagacataggaattagtaacaaaataaaaatagaataaagtaaaaatggaagataggcagaagatagaaaagtataaattagcaaagagcattgtaatctaaaaagagagttgtgggaataaacaaaaataaaagagaaaagcagatgatagagtaatggagttagaggattagtagaaaatgaggctaatgttgtaactaatatatatatagttgataataaaaaagaaagagaataacgtaaatctagaagagattaaagtagggtgttaagtgtacaagatagggagagtattagataaaagaagaagaagaaaataatggagtaatataaagaaaatagcagagaataacataaaatgggaacataggagagtgtagaaatatctataaaaaagatatttttgttgtagtccaaatggagtttaaagtaaaagctaatgagggttcgagaaatttatatgataaaagacatcagtataatgatttcataatgttcaaaccaattattactagagtactactcaaataagaaacagtatttactatattagtaagaagtattatcatgatgactaggtaagaattcatctggacaagaaagttttttatgactgacgatgagacactggttgtttggagtggtaacatattgtttactgtatgatatggcgttttattgaaattcaaagcaagtaaaatatcaaaatagagacaggaaagtttttattgacaacacttcttgtgtatatacaaaataaacaaaaatcaatttgtaatataatgtgtttttatttaatattatgcatatatattgaataacatatttccaagtttaaatattagggatatctaaagatgtggataaatagagagggtggtaatcaatattcaagaaaattgaaggattatgggttgttgtttttatttttgaaataatcattagagaactatagatggaacagaaaaatagtggttgtcaatttgtaacattaaaagttagtaaatatggatattaggggacaatataccagcatatatgtgttgatattactaaaggattcaaagaagtaaatttgaaattggtgataggaaaaattattaagtgatataaggaaagaagaatatctagattagagggtaatattagttaagaggaaaagacggtgagtgactgtagtggatgggtaatattttgaattatttttgaaaagctttgaggaaaaaagatagagtgtagaggctataatcaccaggtttctttagtaaagactgtttttactacattgttgaaaataatcataaataaataaagaagattcagcttgtacctataaacataatatatcttacatctgttgcttttaataaggcagaaataccatttacttaacacataaattatgataatattagattaatactagtgctctttcaaaacataggaattgtgaagaagaagatgtgtgaattagttgagtattgagaggtggtaaatagaagaaaataaatattactaatagtataaaaaaataatcggggaagtacagagagaaattattgtattgttgggaaagggctgaattaatagcagtaaaatcagagactggggtataaaatgtatgaaagaagaaagtagtaaattgaagaaaacagcaatagagaatggatagtggtaaaaacaaaatattagagactaaaagaaagataattgacttattgtcacaattattggatattaaatattttatgatgatgtcaagattatatgtgggtgttcagatctataaataaaagaggttcagttattcatatacaacatgtacgtatatgtgtatagtatgtacagacagaagaaataaaaaaacatatagaatgtagatttaaagagtcgagtattaaagcacagatgtccaatgttaagataagaggagttcaattttgtaataatacatagaagtatggagtatattaaagagggaaagtagtagattaaaaaaataatatatatagtaataaagtaatgtaaggaccaagataacaagagagaaagattattcgtttgagggagtaaggtaagtctacgaagggttatcgaaagttcattgaaggaacagtagtagaggtagagtgggaacagaaatagtagttaaagtattttacaagtgaagaaaaacatggtaatatatgagtccacaataataaactggtgtttctttaaaagtatcctaggttgaggcaagaaaattaatttctacaaagctatatgggtgtacagtagaagataacgttagaaaaagtaatatctcttgattgttgtttagggtttggtttagaaaaattagggttagcaatactccccaagattctcttttggaaaactcacaaacatgagtgaaagagaggaaccaagaacaacccaaatgagtattaaataacgaagagatattctgtacacggtatctagttctagtagattagatatatatattaatattacattcagagaactagagtgaagttatatcctataactattccactgaattattactactatcacacatagatcaactattatttataatcaatgaccagattggtatcataatgtggaagctaaaaataaattactattatttttactagttatgtgcaaacaattgaggtaagcagaatttattcttacaaaagtatggaaatatggtagagaagagagtaagaaaggtataaaggaggaaaatacagtataacttgaaacaaacaaatgataacaagaataattgagacaatacagaataatagaatcataggagagtatgttgaacactatagatggtgtatctaggaatggtgagagaaacagtactagtaatagagatatagtaggatcttggagatagataataaattaatgttatgttacttttaataatgtatggatgtaaggtaagagaaattaactttactaaaatatctagaagtgtgagtgtattgtgaagaagagggtaagaaatgtataaatgaacacgataatatagatgataaagtagtataaaatagaatgtgatagaataaggtaaggtctataaaggatgtgtctatgaattattgatggagaaaatttcactgacagagaaaaggtaatgatgagggttcgaatggtagaagaagtggagtgaggatggaaatagtagataaaatatgagaatggtagtatcctagtgttatatgatacactgatgttacttgtattattgaaagtgtcaggaaataagagaagacgtatttatttttggaaaactatataagtgtctagtagtagagtagggaagagggtaaaatatgtataaaggagagagtaatagatgaagaatagaataacataaaatgaagggtaaggtgaagtatatgaaaggtatgtgtgtgttgttaagagacagtgttatggtgagaaaaaggatagcagtggggttcgaatggtagaaatgagagtggggataaacatggtgcttagagtgaattgtcaaataacataaacaagtggtgggatatgggtgtaaactaatatattgatgttatttatattattagaagcataaaatattaggagaaaagatatttattgtacatagcagtataggagtataatcataacgtaggggggtaagaaatgtacaaatgagcagggtaataaaagaaaaagcacgatagcatggagtggtgaggagatgccaacaaagtatcaaagaatagaagagaaagatgaaaatataagagagtgtagtgaagactataagggaggaatgttagggatattgagagagacagtagtagatagaaaaaggtagcagtgaggacagatgagtgttagcataattgccagatgaaaatgtcaagtagtattttatggatggcagtgtaaactgattgtagtacgagcagagaattataaaaacatatatataatgaaaagaattagattgtgtattgatatgtgttgtgtattagataagtggaagaaaagagatttagagtactactgacatgctagcgtatctgagaacttacaatggtagcaatatggaattgtaattcgttaacctaaagaaaatgttcatagaaatatcaatacagagacattatgccaacagggtgtgatattagtttgtttatgtttttatgttctgttataacgatcattactgtacagctcctaaaccttagcagggtatgagatttgagacaattttcaatgtttatgagttaatgcataggaatacatcaacgttagtttcgtttcatccttttgctactgttgtgtttgaaggtgtgtgtacagtactttgtgtacatgtctatctagctgctatacaaagattcatttgaaaaataaagaatagtcttgtacaggtttacctaaaacatatttttatgtgtgcttagagtatatagtatgacagacataagaaggttatagaataattattatagagctaagcaataaggcaattctacgggatgtgtacctttgtgaacatgataaaatattactttcagtgatgtatttttacgactgtaagatgggctagattattgtaaagtgataagagaacacagatattcctattgtgaaacgtcagagtggggtcacttatggtgtttgtgaatcgatactgttgatggaacagcaatgatgaatatacaagaaacatataatagagagattggtggtgacgacagaatgtagaggattaagcatagtcaataatgatattttagttgtggtaagagttcgataattatagtattgtggagaaaaaatatacaaagggagaagaataaatcaaagaaaacagtagcatgaagtaatagaataatgtaaacaaaatgtcaaaggataaaagaaaaagaatcgacatatacaaagtatagtgatgtctgtaaagggtgtatctctgaagtgttaagagagagtactagtgatagagaaaaggtgacggtgagggttcgaacggtggaagaggtggagtaaacatggaaatgatttaatatttagaagagatgggagagtggtggtatactagtgttagagtttctaaacagaagaactctttttggagtgatatgaaatagagataaaataaagtaacttttagtatagagaagcgagtaaaggtatttttaacaagaacaagagaagatagaattggagcagttgtgatatgttagtataaacagcagagaacatataatgccacgtatgacatagacaaggtgtgggtgacaacttacatgtcatgagggagcagtatgaaatgtgtatttataagtatttggccactatgttaaataatacagatggtatgtgcataaagtgatgggtaaaaagaattatttgtaggttgtatgtgttgagtaagtataaaaaatttagtgagttttgattgagtgtgggtaatatgtcaacacctgtccttcaacagtactcaatgagcttaccttatgtgcccggttctttggtgctctcttatcatataattggagaagttgatggcagataattaagtgattgtggcattaggttttggaaagtaagcgatgaatctggaagtggggagtagattgtggtattatttagagattgtatatgtctattatatacaaagattgatagtattcctgatgttatagagtgttttgtggatgagataatgagaacggtaaaaatagtgcagaaatatagaggaacagtgaagcattgtacaatcataaaatacataaacataaaacgaaatattgattacattggaaataggggtgattgcagaataatactttagcaaggagacacaaacaatattgatggatgtaataatgaagaaatgcttacaatgggatattggtggcagtataaatatatgtaagattgcttggtgatgtgagtatgaaaagtgaaatgaatattagagagggatggagtagaaagtattgtaagaagagaagatatatagtaaaaagagctattgagatgagaagcaagatagtagaagtaagtcagtggtagagagaggacaaggatatgtggattagaatggggcgagtggtgttagagttgtaaaaacaggatgggaaaggaagagaagggagagtattaggatattggatagataatttgaaattaagtggacaatgtagatcaggatggatgaaaaagattgatggttgctgtgtaaaagacattctactctaaggatacttagctgatatggaagtaaagggaatgtttgtagtggatgattgtgaccttaatggatgaacagattagatattttgtttatatgttggtttagtcttctctttgtacatatgtgttgtatgcaagtaaccaatgtatcttcttacatcttgttcttttatgcatcgatacaccacatataacattattgccataataactgcttaattaacaaaaaagttgtttaatatacaatgctgatggtaataattacagcagtttgagatatataaaataagcgagagcaggatataaagaataagaattaagtggatgttaagaagaaagtaaattaaggttgaagtgataaatatagaaaatgggatgagaaatgttggaaagtagtggcatttgtagttaatagtgtgatgacttaagttgttagtagattggatgtgtggtttattaaacacctatgaaaataatatacgtaattatataatatgatatatacaaatataaaatgatctctcttcttgaaaaatatatttctcttgtgaatattattaacaagatactaaaagagtctttagtaaagaaacctaatagacatactttctatgttctcataccccgtaaagagtgtttcataagctttcatgactgaacccagttttactcaaagtaatgctactttccttattcagtcatacaaaacacatcctctggcttgatatcaccctttaaaatgttaattattctagagaagtttctccacgtagtctctttagtaaaagggtctgctatattattttccctgtttattttaaatgtatcaatagacctatcttgtgtttcttcttttgatttttccagtctgagtcctatgaattttgttcgtgttttaaagtagtcctgtttgagtcaatcaatagctggtgtagaatttgttattatattaatgtttgtatttatattttaaagattcccttcgttttacattttaataaaacagcttgatcttcccccatggttggagcatccagttcagcttctgctgatgacccacaaactatagtggattttttggaaaaaccatcataaaaatttttaccaatccatacgataacaccacgtcaaactcagatcccaatgatacatctgcaaccactgtgatgtccaatttattctcctcgtcgcttcttatatatctggtatcattgacatacttcaacaatgttttgactgctttaattactttaggatgagggaacaatcctagacgtaacagcttacctaaagcaaattctatatctaatcttcctcttgttctaatataattaagttttccaatcaatacttgaagccattttattttttcttttaatgtagatttctccatgaccaatttatgtgttttgggatatatagcatacttatgaaggttaggtacgctattagtttttttctatttagatacaatctctttatattcttcaaacatttttcaatatatcttgtaatatgcaactgtatggttccgttttctctgttataatttaaatctaaacctgagagacccgtttctagtatatcgtgtttcataaaacccaattcttttaaagcaaacttgttttttagaatagtctatgttgatctaaaatatcagcaacatacacagctctcataattgatttgtcttcgaacacaaataaaccaggagaataaataaagtcatgcagaccaatagaattcgtaaattgttccaatgaattattccagttctatggactttttaaggccatacttctaactttcaaatgtattttgtcttgcctctaaagattccacatgatccaagtgacctttaatgtatatatatctgaaatgcaccaggagagtcttaaaaatattgatcatctgttgtcaattgttacacatattttacccttctctttcttctagtgtcatgttacacccttgtgaaatataatgatttattttggttctaattttcttaaaacattactggaacattggacagttgatgtttcaggcgttttcaattttattttatttctggtgagctcagttacagcatgcaataaggcaagatataaaaactatttgaagaaatggatagattattcatatcggtggtgggttagacattgtgatagagtgggtctgttaaatcaataataatagtatactaatacttcttctgtgtatgataattatacatactataagtccagatatgaataatctaatcttaatttattttttacaagacaaaaaatattggctgatgtagtaatgtggtggtgtctccaatatagataacatggacatctatgtataggggacaaggatatttcgaataatggaacaaacggatagtgggggaagaaaggtgcgtaggggccaaaatgtagtgatacagtatatactcttagaaagtattaaagatatgtatttatcagttataccccttaaaagcatattatcagcttacttctctatataaaagaacgtaataaaagatatggtaaaacccaaagagccacaagaaaagaatagcttcctcttaaatgagatgcagggctacgacgatattgaacattgatgctgttgtatgagattatctcccaaatatattttctagggtttctgtataaatcttcctaacaagtaaatttataattttcttgaaaacagtgaagattaagaaaagtgacaagaacgttaaaatgaaatgtgtgagattacaagagtgggaaacaaacataaaaaaggcagagaaaggcaaatactacaatatattgaaagagaagaagatgtgtgagagtagaagaataggggtgagtataggtgttgtaagaggaggtaaatgagggcagagaagtagtagaggagatgggggaatgtatggaaatatagataatatggtgagagagaaggtaaatatacatattataatggaatatctcttaggaaaaggtagaatggtacacggtaataagtggtaaggtaaggagggtgtatgggtgttagaacatagagtagtaaacaagtagagtagattagagtgaaaaggtagagtagatggggagatgtatggaaatatagaaaatatgatgacagagaatatgaatattcatattatgatgggtagtttggacaaaaagagcagaatggtacagggtgaaaagtggtgaggtaaggagggtgtttgggtgttagaatatagggaagtaaacaagtggagtagattagagtgaaaagatagaggagatggggagatgtatggaaatatagaaaatatgatgacagagaatatgaatattcatattatgatgggtagtttggacaaaaagagcagaatggtacagggtgaaaagtggtgaggtaaggagggtgtttgggtgttagaatatagggaagtaaacaagtggagtagattagagtgaaaaggtagagtagatggggagatgtatggaaatatagaaaatatgatgacagagaatatgaatattcatattatgatgggtagtttggacaaaaagagcagaatggtacagggtgaaaagtggtgaggtaaggagggtgtttgggtgttagaatatagggaagtaaacaagtggagtagattagagtgaaaagatagaggagatggggagatgtatggaaatatagaaaatatgatgacagagaatatgaatattcatattatgatgggtagtttggacaaaaagagcagaatggtacagggtgaaaagtggtgaggtaaggagggtgtatgggtgttagaacatagagtagtaaacaagtagagtagattcgggtgaaaattggtgtagagagggagtgatgtatggatatatagataatgtgatgacagagaatgataatatttatattatgatggatggtttggagaaaaagggtagaatagtacagggtaataagtggtgaggtaaggagggtgtctgggtgttagaacatagataagtgatataagagggaaagtaagaaataaacagatgaaagagtagtaaggggtatggggagatgatgagaagatggagagtagtggtgtttgtgttaaatagagagatgtaaattggaggtgtggattattagaaaggtatagaaataatacagataagttaacatgtttatacatgaacagaatttgagtgtcttgttgaaaaatataattgtgttttgattattattaacaagataataaaagagtgtttgataaagaaaggtcatagagtgagtgtgtatgttgtaagaataaggagattttagatatggtaagagttggataattatagtgttgtggggaaagggagagattagtggtggtgaaaatgggaaagttggtataaaatgtataaaaggggaggggagagtatggatgagagaagaagtagagagagtaggagagggtggtggtgagtagtagaagataagttagagatattttagttttggagagatagagaaaagaagatattaggataaagagaatagaaaagaggaatagaggagagtaagagaagggagtaatgaaaagaagtagaagaagttgatgagtagtgagatagtgggagaaatatagtaatagaaaaaagacatgagagagggttcgaacagtggaagagaaataataatagagaaaaggcatgagagaggatagatagaagagacatattaatagagaaaaggcatgagagaggattcgaacggtggaagagtagaaggtattgatgagtgataaagaaataaaagagaaaaggcagcaattgggattcgaacagtggaagagtagaaggtattgatgagtggtaaagaaataaaagagaaaaggcagcagagagggttcgaacaggggaagagtgtaaattagaaaagggagaggtacagtagtagaaaaaaggcatcggagagggttcgaacaggggaaaagagtgggagatagaagtgatgatgggagaaatatagtagtagaaaaaaggcatcagaaaggattcgaacaggggaaaagagtgggagatagagatgggtagtaaacagataaaagagaaaaaaagcggcgatgaggattcgaacaggggaaaagagtgggagatagaagtgatgatgggagaaatatagtagtagaaaaaaggcatcagaaaggattcgaacggtggaagagtagaaggtattgatgagtggtaaagaaataaaagagaaaaggcagcagaaaggattcgaacggtggaagaggagaagatagagatgggtagtaaagaaataaaagagaaaaaaagcggcgatgaggattcgaacaggggaagagtaaaagatagagatgggagaaatatagtagtagaaaaaaggcatcagaaaggattcgaacggtggaagagtagaaggtattgatgagtggtaaagaaataaaagagaaaaggcagcagaaaggattcgaacagggaaagagtgtaaattagaaaagggagagatatagtagtagaaaaaaggcatcggagaggattcgaacaggggaatagagagtaaaaaaagatgagtagtaaaagagttagataatgagagtgttggaaagtagtggtatttgtatttaatagagtgatgagttgagttattagtaaattggaagtgtggattattaaaaaggtatagatataatatagataagttgataagtttatagatggatataaagtgatggttgatatttttatttttcaaaaaagaattttgttttgaattaagattgtagaggatataaatagaagaaagtatagtgaagacagatactagaggtgggagtaagggagtgtggtgttgatataatatagtggt

SEQ ID NO: 11 - DNA, 594422 bp, Kazachstania heterogenica
  source 1..594422: mol_type = genomic DNA
aaaatagtatgatgaaattcttggctttatatatgttaacattcagccattttcctctacgaacagtaagatatttaataaataaactcaacaacttttggtgacctctcaacaattattactcaacaatttatcgtttagtgtctgctaaaatcttattgttctatctattttatcataaaacattctatttcaacaattataatattgttacatgttccttatttaaaaagaaagttcccacattattgaaatcttaggatgattattattacgatatttttcaagtgtagaggggaaattctcctatatcttgtaaaatcttgcaagctctgtatccaataaaatacaggaaaagatacgatagaatagctgatcaataaagcatagctgttaccgtatgctgtatatctacatttttatgtataatattcttaacatgtatagtaggtatgatatatcatcagtgtgcaattatgagtatttgaaaaatatcttggcacctcattttcttgcacctctttttgtgttaatcaaagaaacttctattctttgaaaattgttagagtaattttatggtatctttttactattcgtgtgagaataatagtttttcaatactttatttcatttagggtcaaatatgatgttacaaaaataaaagaagtggaagtggaatcattagtcaaaaatgaaagtaataagagttagcatatttatgtaaatgtacatatatatatatagttaattgacttaagggacaatagtgttgtcaaattaacatatatatatatatactatttattttcatgcccgtgtgtgcgtatatatatgggaaagagaggaaacaataagggaatatagaaagaaaaagatttaagacattcttgcttcgcatttaatgatcactcatctagtcaagttcttgaatactaatataggtagagaaatattataatagtttttaagatatgtgtcaatctttttattatgatctttgaattaaactagcattaaatcttcataattacaatttttcttaattagaaagggtttaaggactttatatcttttaaactatgatcaatttatttatacaacagtaaattttctaatcagaatcactttattaaatgtcgttaaaatatgtgaaaaaaatatacatgtattaaaatgtctatatagcaactattagatagtataattgtgttgaataatttaaattacttgaagttaaaagacgatattgttggtttattaggaatgagcagatctattttggttgtacatgatatttagaaatcaaataaataataaaaatacagtatgaaaaatattagaatattatatatgcttatgtagaaatacttaattattaaattatttagaatactttattttaaaattctttgtcttcgatcaattgaaattatcaagaataataataaaccaatgcaatgggcaacactccatttcacgtacatagtgctaccctcaccttcatatgatgcaagggaaggtatacctccatgagatactgtaacagcagttgatgatgagaatagttgttcagaaacatattgggaaacttttggcaccattgtagttagcaatgtttctggtctgctagactcggtactatcgactatagtagtagatgttttagagtttctagatattggttgattttcactgtttgtaaatgttgggccagtggtggtggaaacaatagaagcaactggaattgcattagacatagtagaaaatgaattagtctcttcttattcgttctttgaattagtataaacagattcaatggaaatatggtcaattatagcagtaatacttgtttcagaagttgcagatggctctggacaataagttgtagttattgtaactccatgaaccactgtagttaatactactgaggtaccgcttaaagtatatttggtcttttcgctaggaatagtggagtttctgtatagaggagaagataaagataccggtgatgtcatgaagctactgcatgcatcctatataaggatgacagtagcaatcttggtaaaaaaaagaaccattgctgtcagtgaatatagtagcctagctagtagatagtgcaggcataacaacttcataaataacttcagctatattataaccatactgattggttgtagcagttattatagttaaaatagtggtagattaagtaataaaattctcagtaaatgctggaattattattgttaaaacatggatagtatatctgttatccattaagttttcttattaaagatttttttattatgtcgtcaagaatgataattagaacaaaaaaaatattatttaaaagaattaaaaagaagaaggaataaagttgtatttatgtataaacatactatataatattgaatattatttttatatgtttttaataaataagagatctactttattaatgacttaagttataaataaggtaaaccaaaataccaccacttttttaggacaaataaataaatgtggtataaaaaatcattaaataacatgaacttagtccaaacagatatagaaccacccattaggactaagttctcgtaatcacccattcatataacgaatcaaagaaattggccaaagaattatcatacggttaaaaatgcacttagatatggagtaattgggtcaaagaaagacttgactattgtgagatcaggatttctaccaactaagaaaaataaagaaaatatggtactggttcaaacatattatattcctcaggaacaaatcaccatactatcagcatctaaattgtatgaagaaacaaaatttcccttcctaaaaggatataatattttagaaatctctgaaggtgaaagaataaatacattaataaaaaatgattctgtttgggtaaaaatagaagaaattattgatattccaaaaggtaaagtgtattatatcaggccagaaaatccagttgtacagaaaccaatcatagcattagaagtagcacatattagattgaataatatgtcgaagagacttattacagaaagggtcaagaaaaatatctatgaggatgtatgtaatataaaaatgtaaaggaagaagaagattggtatgctacatgtatatctggaaaattggctcgtcattttcactacaagaacgttatgaactactacaataaattaccaggcgaatcatggtcagttgacatattcggttcaataaaaggtctacaagtaaaacaggatagatatatgttattattggtagagaatgtatcaaaatacataataatttctactcattgttgtagggaagctaaagaaattaaaccccaaatactacgtaatatcaaatttgtggaaactcaatttgatagaagagtaaaactaattatcagtgacaaaggcactgaatttacaaatgtagagttaaaggaagtcttgaaggaattgggtattcaattaatattaactccaattcaaggccattctagtaacgcgagagcggagaggaacattcgtacaatcatcactgatgcaagaatgatgttacttcaatctagaatgcagcgaatatcagaaactgttctttaacaggacaattcatgaggctccattgcgattaatttcaaatatcaaaccagctgtacaacatatatcacttttaccgttgggtgcacttctcttgttatgagatccaatcaaaagcaaattaaaaatgccatcaatactgagattagttctctgaacaaagaagatgatacttataactgaatattttatgttattttctactataaatcacttatcatatatatcaaggaactatgaaattatgatcgatttatacaataaagaattagaaaagaaaataggagaaaacaaagatatagattttacagttgatgagataatcagcattataggtataatttatgatgagttagacgacaataacgaaatataagacgatgaaggtttggatctagctgatattcgacacatgtcattagatgaaattttgttagaacacctggtaatgaaagcaattgaagatatagatgaattaacaacaactaatatcaatggtcttctcttttataactgtgatgatgaactcaatgaagaaagatcacaacatgatatgtccaagaaaaatgatcgtgtaaattatgaattataaagaatcaaaaaggatgataataagaatactgatattaatgaagaaaaaacacaaatatttgtgagtttattaaattctgagacaataattgaggaagatatagatgaacatataatcgaaaatgaaattaataaagctaaggagtatggtattaaaatggttgaagaaataaaagaaaataaaaaagctggtgagagcattaactaatgaaaaacaaatatttgatggttctaaagaagaaataatagtgaatacagattcacaatatcaatttttaaaacgaaaaacatagaagttgagagccagataaagagataacatggggtgatgataatgtaggtaaatgtgaaaataaccataaattacaaacctctctacatggtagagttaggtatagaaaaggaaaacacttgaaatcaagtaaaattttaaacaaaaaaaaaagaaatattaaacaagcattcaacaagaaattatcagataatattgtttgatgaagtactgatgagaagaaacataaagatattgacgatgattatcaagagaaagaaaatctccacgaacaaactaacggtctttataaaaagatgacaagaatgaaacaagagaaagaaccataaataataaaaaagagaataatatggatatacaaggtgacaaaaataaattaattgagtgttacaacaggagataggcgatgttttatagaagggccttttacaaaaagaaaatatgaacataattgtgagacagatagtatcaaaatatcagtatagataataattgcaaatacacaaccaaaagtccaaagaagtttaaaataaagaatttctatttgaaagagaggcgtaccaactaaaattgatagcatataatttaaacaaacaagtgcatataacaaaaactttggaaaaaaataacttagcagaaatttcaattaaagagatggcgtgggttaactagtatgctaagcatggcatagagttaggggcggacctctaatgactgaataaggagagtagcatgacttttactaaaattggttttagtcatgaaagataaaaatactctttatgaagttgtgttagaaaatggataaaatgctcaataaattattcttattgaagactattttttattatgtcatcaagaatgatgatcaaagagaagaaggattaatttgcatttatgtataaacattcgtggaaagtgatggtattttggtttatccttttttataatttaaattattaataaagtggatctctagtttgttaaaaaacatatagaaatggcattcaatattatatagtatgttcatacataaataaaaattgatccttctttttttttcttaattatcatccttaaggatgtaataaaaaacagtctttaataaaaataacttagtgggtatactgttcattctgtaataaaaataatatataagtttatatattatttttataaattttttaataaattagagattcagtttactaataacttaagtcataaatctggtaaaccacaatatcactactttccaagaattatcataatttttgtatattaaagaaatttttttattaattaaggtttttttatgaggacaaacttatatgtgatgtttggatgtatgaaaaaataatggatgaaaatttttttcaaaagagaaaagaacaaaacccaagaagtttatttacacacaacttatatacgtatatgattacgtagtatatacagacaaaagcaatcaagaaacatgtggactataaatctaaggagttcattagttgaagtcacaggtgttcagtaataataattattgctgactttataatatctctatggacagatgggacaatattcataagaagaatctatatacgaatgaactcctaatttgatagaatgacctagatgatgtactagaaaactaattacacactcactttaaattatgtaaacaactagcgttcaatcagtaacagtaattctctgttgcaaaattaggatttataatacctggtaaggcacaaggtttttcagcaaattttatatcatagtctacatctaagaaaaaaaatttgattcaataaaattcatacctttaaatgaacatggcgcaacttttgaattaataatatgcatacccacgtgaacattggaatttttttttttccaataatagctgcgttaaagagaatagtggcctatttagtaccaatgagtccaccatgacctttgagaggagtattgaagattatacctttcatatcttatttattacaaataaaaaatttttagttgaatattatttgaggaagtctaccagaattaattacaccattattagttatagtaccaaaataaaggaacttatttatggtacctcctttatccgctgtatcatagtcaataatacctggtacaatagcagcaatctttaattataagacagtaaatgtaccagagttatcgatatgatctggggcaatgacgaaatcagtgacagaatttgctgatttaatattttcagtgttgatgttaccattatttgtaattgttgtagtagaaccaaattgtaaactggttaactcgttttttaaatcaccaataatgtctaaagaacccttaacattaatattaccgttgaaagaatatgaagagcctgataccaacgtaaaagtagcgcccgattcaattacaatatcattggaaaatggttgatcaccagacaaggttgttagtgttgaaatagtggtagtagcagcacttacttaagtcacaagtaatcctagtaagggccataacactaatgtccgcattttaacaataataatgataaatgaataatggttaattttattttgcattatattatctagttagtgttctttttgtttgatttttgtttgtaaatattgccaaagaactttattataattttgtatactaaatctatctaatataatattgagaatgcttactatatacccaatgactataggcgctcattctcgtcaataattaatctcttctatgttatagagcatggcaaaatgttaaaatagggatatatcttgtttgaagactttagttactattttcattgatagtggatagaaacttaatgtatatttcttctttttttcccttatgtcatgaccaaaaataaataaatagcatgtatgtttatatatcttactatttaattacttttctcaacttagttatcttttctatatataaaaaatgatttttttattcagcgaaatgactgaactagactgttctaacattaaatatatagaataataagatttcaatagttgccaaacaattgaatgatgagtaattaccgtttacaaatcactatatgtcaaaaaaaaaatttgacttagttttttaattgattgtatggaacgttaattaatgattatatatattaaagtcgaaattttcctcatgttatattttttattttggtttacactattttatataaatatttctttattatgaatacaaaaagggaaagaatattatattaattttgtatgtcgatgattatgtttgctgaaatccaatagtatttaataaaataaataatctagttagattttaccaattataaatctataccacaatttagagtagatattatttacattttaatagatataaaaaaacaaattaataaagtcttgtcacccatggaagaaaaatctccaatatgaatatatacaaagctaatggttttttcatgacatattttgttgacacaaagcctcagtatcaaaaattctattaacattcattttaggttaatataataagaaaatataacttacaatagaatattggtggtattataagttcttggatatttacagtatgatagtagtgataccataaattgttattgtattattcgctttattttgttctacatacttgatatacgtatatactttatactataccacattttattttagcttttcttttataagttactataaaagtttcagtcatttgatacaaagaaattggattatcacatatatctctaaccttacttcaacatgttttacccttgtagactttttatacaccatcatctctgtgttacacacatagaaaaagatagataaacttaaacatagttttgtacattatgaatacataactataataattgtgttagagcatagacagtatgtctattaggtttctttattaaagattgttctattatgtcgttaataatgataattaaaagagaaatttttttttcaaggaaaaaacttttaaaaagagaattaaaagaagagggaacaagttgtatttacgtataaatataatatataattatgtacattatttttgcaggtttttaatgaattagagatccaacttactaataagctaaatcatgacagtatcaaatacaaataacactattcttcaggatttccattataattgaatagatcctacgcatatttttaacatggttcttttaattagacttcattgcacatactttatatattttgtaattaataaatcttcaaaattatttttttccatattgtacatttgaaaagggttaaacttagcatttattgtaagtagaaaaatagatagtaaaataccttacactattttaacatataacaagaaagtaatgaacaatgattttaatgattgtatttattatatacagtgctattgctctacgctttggtggttcaagtaacatctaaaagattaattattaatttttttttccttgaaaaaatattaaccaaaaatatggggatttaattgtttagtaataatagtacaaataattatagttctaaaaaattgtaacatattttttgatttgttgcatgtgcataatattagtagatgacttttaaaagtcatatttttcctcaaatattaacctcaaaagctttacaatgggaaaaaagtaccgtgggggcgtgaatattacaatcttttccttcgtcttcttaacatgtgaaactttttttttgagttcctcgtttaaatagtcttaaaaaaaaagatgagcctaaatataagaaaaaacaaatgatctgattagtatgcttagagcgttaataatgcaagaagaaaatcgctcttttaattttttatttggatattctttaaaatattattagaacatcagatgaaagcatttaattggaataaaatagcaagggcatgattttactcctgcggttttgatcttgaaaagttcgacattgcaccaaaagggacatatttcaacaaaaaagagtacataaaatggtgccactttccaagaatgtttaaacttcccttttagtacacagtgaatgactttataaaaagtcttagagagatagggaatctctatttttgtatttttaatttttttcctattattttgttgcataatactgtattgttttgaaaataacgtgattactctcttaagttttcttgtttcaagaagagtctagaattttctttgaactatatttagtagactaaagttctaccgggtatatccaataatagatgcattgttattttaaactggagattttgatctttctttgaaaataatccatagaattttcaaatgtggaagtattattttggccaaagtataatgggattgcgatattttttactaaaaacttacatctacaactaattagtattgcacatgtcttagaggaatatttgactagaattaaaagaaaaaaaaagaaaaaaaaagaaaagaaaaaagaaaaataaaaaaataaaaataaagcgaattttttatgatgaaaaaaatgttactatggacctattgttttatgcgagaaaataaaaataagtgtagcgaaaaagtatagaaaattagaaaatcattaaaatatctcgagattcactaaaaagggaatggacaaatggacaaataaaaataaactggtattgttccgctatattgcaattaatacgtaaacgtgtatacaatagccatgtcacaaaaaattaattcacaattgcatgtgtttttttttttttattattttcctgtcttgatttctgatatcggatccagtcggaatagctagttaatcggtcatcatttttagtagcttcactaaatttggacatcacactatttgccggttttaatggattactgggcttatcactaaaattcctggtttctttagaaatggtttgttttcgattgacttaatgtttgggtattcaaaatatctgtgaatcaataatggagtagcagctataatatcataaactgttcttttttttttttgtcgttcccttctgcggttttccttttgtatcctccagtaactgaccttttcttccatctgttaaatgtaagtttttttgcttaacgcttgataataactgagcagatattataagatgtagataaaatcatttatattaagagattcttggttttttgttacttatacaaatattaataggatgtttgttgaattagattttttagaacatgttttaatgaatagtagcctgtttttattatatctttgttgataggagagaagatatagaacagaaaaaaatgttcataaaaattatggaagtaaattgttttttgtaattaaattatactcgtatacaaattaatcctggaaattttcttatttaacataagaagaaaaattatttataagtctgagacacgttccaaaaaaacagtaaaaaagaattttcgagttttggatttctattcagcaactaacaaaaagaaattacaagtgaaattaattttttttgatactttttaaaatgttttcttgcaaaaagaagagtcgttagaatcgtgttatgttgagaagtagtatatatgtataatagagatgttgggtactcttttaattataattagcatctagttaacagtataaaaataaaagaaaggttctttctatttcctttttatacataatatagaaactagaacatatagaaaaaacgtaaatgaagtaaaaaatatgttatgaaaaattcttgagtttatctatgtcaagttttgttaattctcttttgcagaggacataaaagaatgaaataattccattaaaagttaaatttgtaatcattaaatactcaatatttcattttttaatatttactaaagtataatttggtctatttttcttatgctaaaacatcttattacagtgtatattatttagaagttatataattcaattatttccagatctatagcgtttttctttttaattttttttataattttaaataaattcatatgaataaataaacaaaaatacttgtttaaaaaaaagatataaattttgttgacgcaaggcttcagaatcaaaaattctagtcgagttcattttaaactaatataataagataatgtaacttacaataggatattggtggtattataagttctattattatttatagtaggaagttagtggtactataaattgttattttattgcttagtccttttctttctatataagtaatatacaagatacaatattatacagtatactcattttatctttgaatcttctttactataaattttcataacttttaatcacttagtacgatgaatttagattatcaaacatagctctaataattatatttcaacacacccccgtaagctaaattcctgttctattttcttcatgaataaatctcggacttttataaaggcaggtcttggtaaaacttttgtcattatatcagcaatttgttcagttgtatttatgtgaccaatttcaataataccagactctacttggtgtctgatgaaatgatagtgaaggttaacatgtttcatttttgagtgtaagacagggtttttagctacgtgaatggcaggttcattgtctatccataatttaacttcgtttacatctattttcatgtgattcaacatattttttatccaaattaattccctgcttgtgttgctagcagaaatgtattctgcatcagtagatgatagacaaactgcgcttgtaattttcttggaagaccatgtaaccactccaccagcaagttttataataaacccaccagttgcatgtttcaaatcattcttatttccatgagatgcatctgagaatccttcaagatatttattggatcttgtattataagacaatcctagttttttggttttatataaatattgcataactctgtaagcaccttttaaatgcacctctctaggatctttgaggaaccgtgatagtagttgaacagagtgagctacatcaggccgtccaacgttgctaacaaatagcaactggcctacaatactttggtattcagtgatattggcaattgctggagattctgtgtcaaagtaattggctgtgttagataatggaaattccacatttttatttaagtctatttgacagctctgagcagctttggtaatatagtcctccattgagatggttatattgttcaggttatcttggtaaacattcattcccaaaaatttagaaacagggccaagatctttcatggaataagcttcgtttaaccctgctttcacagagttcataatatctttatttggagcagcaattaaaaggtcatcaacgtaaagtgcaatcaatactttaaagttgtctacatttttaaaataaataccatattctccatcatgacgagtaaatcctctcctagataatgttttatgaatatgcgtgttccatagtagtggggcttgctttaatccgtacatacccccgtaaagctgccacacgtgattgggatgcacaggatcaacaaaacctggaggttgacgaacgtaaaccggctcttccattttggaatttaagaaggcagtgtctacatccatttggtgaacacggagattaaggagagcagagatagcaagaaagatacggacagaatcataccgcaccacaggagcaaaggtttcttgatagtcgatgccagctttttgagtgtgtccttgagccactaaacgagctttaaaccgatttccgtccttaatgttaaacacccaacgagaccccaaggcacgacgaccaggagggagaggagtcaacctatatgtatcatgatctttaaaagcttgaagttctttcagacaggcttgataccatttatctttatctgatgaactcattgcctggttgaatgtatttgggacagaagtagtggtagacgtaaaggacatgccatgtaccaacgcagtcaaggctatgtgatgtgaagagttatcatcagagccagatgattgagaagaagggaataccggtgttctaatgagttgggtgagaccatccatggagttcataggaacaaaactgccggagtcaatattaacagcctcaacagcaggggtaccaattttaccaggactaattggattagaatcccactttggatggtgtttctcaatttgatgatttaagtagaattcagaagcaggaataggacctaacttgttatgattaacaattgaggatgtttggccattcaacttgctaacatgtgtggtgataggggcggaaatattgtcagctaattcaattttactattttttaatggtttatggggatctaagtcttctaagttataaaccggtgaattatcagttgataaggatttggattgtagattaggagaagatgtgtcggagtgggtatcatcaatggtagatgttaattgttgagtagttactggaacagctgttggagtagttgaagagtcagtatcagaggatgaagcaattgatgatagttcttctgcttccttcttgtttatttgattagaattatgtgaggagaatgaggcggttgactcattgtttatagaggatgaatcaaggttgttgaaagtaaaattttcacagtcagaagtcgtagaaataggagaagaagagaaggaagtagatggtagttcatattcatcagaggaagaggagtcatattcgtgcttatcattgtcagatgaatcaactcggaacataaaagaatcagaatcaacagatgatagatacggagtggagtatcgactagtaccttgatctagaacctcatcaccatgtatggtggttaattcattttctaagttgttttcatatataggataatcagtagtttcaggataataatttgacgtttgtatttcagaagatgaagttttgaaaatatcagtagatgaaggataaactgggacaccacctaaagtaccagtggcaaatgtatgagccacttcaacttctttggtacctgcaagtgggaaatcaagttcatcaaagcgaacttggtttgatacaaaaattttcttagaaggaggatgatagagacggtatgctttgtgtttggagtcatatccaacaaacacacattttacactagtaggagcaaatttcccgtcacgtaattgatgaggtaatgtagcatatgcagcacatccaaatatacgtagatgtgataaatctagattttctgtttgaatattgttccagagacagtaagggatagaataatttttattagatactggtaacctatttaagagatatacagcagtacttacagcctctgtccacatagaaggaggtaccttgcctccgattaaaaggcatcttgttttttcttcaatcgagcgatgagatctctcaactgctccattttgaaaactattgtatggaacagttaattgatgggaaattccattgcttttacagaaattatgaaatttactagacataaattcacgtccattatctgtgcgaatggcacccaccttaaatccccctcttgacttgaaatgattctcagtttctaagatccattcaatcagcttatcacatgcagctgatttcgatgctaaatgaattacggaataatatcttgagtaggcatcccggatagtcaaaaaatatttactatcagaaaaattagtatacctaaattgaccacaaatgtcaacttgtagcagctgtaaagggctcgtatattgtgtgtcagaaatttttccttttttcataaccccttttgaaagggaacaagtgggacacaacgagtgtttatcagcttccataatgggcaagtcaattcgatttgccaatcgattataattagctaaacctggatgtcctactctagcatgccatttaatggcatctggaatatttgcctttggagatggcaaaacagaatggtcatacgaaataaaagcataatcaagtggtttgttcatcgtttttgtttctttattgttgggcataaaaacataaagttgatttctcatttcaccaacttgagtaattttattatttttaattgtatatacctttgttttgtcaaatataaatttcatgtttgatttagaagaagccattttgacagaaatcaagtttacgttgccatcaggaacatatgccacattgtataatgtgacatgtcctagttgtactgtaccaatacctttaatagcagttttacctccaatgccttcgataaccccaaactcattctcatctccttcaactaactcgcaaaacattgaacggtcgtgagatatgtgctgggtacaaccagtatcaaaataccaatcgtttctcgatgttgtattttgtttgctaatcaacgcaatccaagccgtatgagaattattaatcttgtaatctttttcatgatttttatttcttttgttctttaaccattcttgaaattctggacactcattagttttatgttgtcccccgcatcttttacaattgaagtttttaactttttgcttgaattgatttcttcttccaacaaaactggagttagttactcctcttttagcattactaattacatcatacacttctctcaatttaatttcctgattcttaccgaatatatccataaatctttggtaagactcatcatataaactcattaaaaataatgaagcagctctttcacgagctttaatcttgatgactcttaaagcctcttgttgcgcagaagttaatgaatttaaaaaattttcttcactagatgtggtttcaaaaatgacctccactaaacgattaacaagatcatactggtcgtctaatgttaaattcctagctttagctaactgaaagaaaggttctgcagctacatcaatagattctgtaccaaaacactcagttaagtgatttagaagaccttttccagttgggataccgtaatcaccagcaacatatctatctgcttcttttttagcagatccttcgacattattaacaattaataattttaatgccgtttcaaataattttttaatataagcaatcatatcattagatggattatattgttcaataataacatttagctttccattttgtgcatattgataccagtgtaaattgatatcagacatatgcatagctaagatgtttatccattttttaaagttctttttcccgtccaatttaattggaatacaacctgcagctgtagctacagggctcataacctgttgacgcaaggcttcagaatcaaaaattctagtcgagttcattttaaactaatataataagataatgtaacttacaataggatattggtggtattataagttctattattatttatagtaggaagttagtggtactataaattgttattttattgcttagtccttttctttctatataagtaatatacaagatacaatattatacagtatactcattttatctttgaatcttctttactataaattttcataacttttaatcacttagtacgatgaatttagattatcaaacatagctctaataattatatttcaacaaatttaatatgctatatttaattacagaaagttgcacttggaaaaccagaagtatgaaataagagacttaagattaccaacaatttgaagacaaactgtaaatgtgttttattgaaatatctttaagtataatctttgacactgaatagtaataaaatcttatattaaaaaaactcagctttaaaatgaattttttgcatattatatcttttatattaataatataaaataaaataaggaagtatgtgttagagtagaactaatatctttatataaataaactagcaactcataataacattagaattctaatataggtttaaaccgtctcaacaaatccatttaataatgagttttaataaaagttttgttatttagatcttgtaaaacatttattttagtatagatattgtatatttaaaatttgaacagttttgagattcctttagatgttttattttacttagattctatttcaatatttttcaaccataaaatcattctcaaataactgtttcaacattcaaagcagttaagtattacagtttatgtgtatttagtatgtaatatacattctctataattatagttatatatttatagtatgtgaacttatggttaggtttattgatcttcttttgtgtgtgtaatacaaagatgacagtgtataaaaagactacaaggataaaacatgttatgaaaaaactattagctttgtatatattcatattggagatttttcttctatggttgacaaactttattaacttgttttatttatatccattagaatttaagtaatatttattctaaatttttgtatgaatttatagttgatgaacatttaatttagtagaatgttaataatactccagcttttataaaaaatctctatatttttattctatcgaattaatatacaacaaattatacacattacatcccatttcacacctgaatttctttaatataaaaatttatcattttttcaagtattaattacgatggatttaaagtaattaaaatatctctaaatatttttcaacattaacttatataatacactgagctgtatgtagtaatacaactacaaacttttaagttattaattttaataaataaattaatgatacaatgcatatttcttttattaatattaatatatctctttataaaaatctgagaaatattataatgagaatgattttatcgaaaattacctctgttgctttttcacaataattagaggtttcttgaataagttcaccaataacttggcaccaacattaattcagtgacttttaaaatacatttatagtttgtattgaaagttgtggcttttctaaattttttatcctggctgtatatcattacccatacgtgacatgcttcaggatttctaggtagaatttcttacacttaaaatagaattttaaatttacgtcttcttaatgcacatctatatttatttatttgatcctattaatttatttaaaagttcaaaaaaaataaaaagataattatcataggtcctgaaaaattccagtaatatgattcctcaatgaggtttgctaaaaaaagaatgttatagaataaaataggggaccaatcagatcctaatagatgctagccaatggaaaaatgagtgtttgtgatttaggcatgattaagttttgttggaaatatttagctaatctttttagttgtttgtcaaaaaacattacttaacagccacagatactaaatataggaatattcctatatcatatccttattttgcttatcctttttgtatataattacttctgtatagcaattacagcaaaaaaagaggggagaactctactgtaattttgtataatgtttataattgaaaatatatcagacttaccaaacacaaatagttgttaattctccacagcagaactgtaatttatgaaaaaaaaaaccattaaaaagtatccaaaaattaacaatttctttactataattccattgttttttttgttaaaattcaaacatagaaaaattttcttcagttctttttgtaacgtatctaagagatagaaataactagctttttatatgaaataaacatattttcaaaatcaatctataaataactaaaattcatttgcatagaatacctaacttccataatttttatgaacatttttttctgttctatatcttctctcctatcaacaaagatataataaaaacaggctactattcattaaaacatgttctaaaaaatctaattcaacaaacatcctattaatatttgtataagtaacaaaaaaccaagaatctcttaatataaatgattttatctacatcttataatatctgctcagttattatcaagcgttaagcaaaaaaacttacatttaacagatggaagaaaaggtcagttactggaggatacaaaaggaaaaccgcagaagggaacgacaaaaaaaaaagaacagtttatgatattatagctgctactccattattgattcacagatattttgaatacccaaacattaagtcaatcgaaaacaaaccatttctaaagaaaccaggaattttagtgataagcccagtaatccattaaaaccggcaaatagtgtgatgtccaaatttagtgaagctactaaaaatgatgaccgattaactagctattccgactggatccgatatcagaaatcaagacaggaaaataataaaaaaaaacacatgcaattgtgaattaattttttgtgacatggctattgtatacacgtttacgtattaattgcaatatagcggaacaataccagtttatttttatttgtccatttgtccattccctttttagtgaatctcgagatattttaatgattttctaattttctatactttttcgctacacttatttttattttctcgcataaaacaataggtccatagtaacatttttttcatcataaaaaattcgctttatttttatttttttatttttcttttttcttttctttttttcttttttttcttttaattctagtcaaatattcctctaagacatgtgcaatactaattagttgtagatgtaagtttttagtaaaaaatatcgcaatcccattatactttggccaaaataatacttccacatttgaaaattctatggattattttcaaagaaagatcaaaatctccagtttaaaataacaatgcatctattattggatatacccggtagaactttagtctactaaatatagttcaaagaaaattctagactcttcttgaaacaagaaaacttaagagagtaatcacgttattttcaaaacaatacagtattatgcaacaaaataataggaaaaaaattaaaaatacaaaaatagagattccctatctctctaagactttttataaagtcattcactgtgtactaaaagggaagtttaaacattcttggaaagtggcaccattttatgtactcttttttgttgaaatatgtcccttttggtgcaatgtcgaacttttcaagatcaaaaccgcaggagtaaaatcatgcccttgctattttattccaattaaatgctttcatctgatgttctaataatattttaaagaatatccaaataaaaaattaaaagagcgattttcttcttgcattgttaaggcaagtatcattaatttttacatattgtgttatttttatagcattcttttctaccaatgaaatgtattatagttctataaaattctgaaactttttcttttgatgaaaattttaaagaaggactcagtaaaatctttttggatgaaaaaatcaaaacaaaaaaagtaatattcaagtttttaacctattattttctagatagaagctattgtatttaacgaccctgaaaaattatagtacttctaaggtattttccattaacatgtgtaggtaaaaaaattcagaggtaggtataaaatattcagaactattattatctatactattattactaaacaaatatgcccctatatttttgtccgatatttttcttgagaaaaaaaggtaacaataaatttttctaaatattactttagataacatgttacgtaacaatagttaatatgtacaatatatgcaaaaatctagagaattatttaatatttttgtactagatatgtggggtgatatgaaaaattctatactcactatgactttatttttggtaaaaaaaaattaacccttcttacgatgcacaaaaaaaaaaagaaaaaattttaaaagcctatcaattatgaaaagtgtaaagtctgaacagtaagatctaaacaaattaattatgttaagattatacacaggacctattctactttaataaaaaatgattaatctaaattcttaaatacaagttacagcttgtagtttttgtgggcgatttatgataattattatgctataagaattatctacttcttattaggatatgtacatttcataaattagagcctaatatattgagtaatgtggacacattttcaattagcatatcccatttcagtaaagtttctgaataaaaatatcattttttgtgcataaaatggataactggttcattatgaacaatttaatagtgaaatatataagtttatgtatattttttactcttaatcataatacataagagcaaaaaaagaaatgtacatagtatatctatctattattgttgaaaatagtaattagaatttttaagtaatgagcatttatactactaactgttgtgacgttctggaataaacaagcttatacatgtttatattatgagaaaaaagacagggaaaaattcgagatttttttgtgagccctattttgtcctactccaaaaggtaaatgtttgccgaaatatcaattcaagacgcgaaaaaccccttcaaaaagaaagacaatagaatatacagatcttttacactaaacgaacaccgattataaattttttagatatagtacacaaaacatatttgaatatctatcggaactaaggatatgaattttgttgattgacccagttttatttttgattgtatcattgatgattatctctaatatagaattgtatatttgcatttttgtaatatataaagagccctttatttttttctccatcttcgacagattttgttgttttcgcttctttattaattctattcttgtgttatcttttttataaagtctacaaacataagttatctaagaaacaattgaataagattatataacataaaaaaatagaagtaattattattcatttgttatagttaaaatgcaggcattaattttgtggtcactattaggattacttgtgaccaaagtaagtgctgctactactactatttcagcacctacaactttgtcaggtgatcaaacattttctgatgatatcgtaattgagtcaggtgctactcttgcattggtatcgggttcttcatattctttcaacggtaatattaatgttaagggttctttagatattattggtgattcaacagacgggttaagtaatctacaatttggttctactacgacaattacaaacagtggtaacatcaacatcgaaaatattaagtcagcaggttccgctactgattttgtcattgccccagcccgtatcgataactctggtacatttactgtctcacaattaagggcggctgctagtgtactaggtactaatttcactatagctccaactgaatcatttatcaacacaggtactatcgactatgatacagctgataaagggggtgcaggaactgggttcctttatcttggtgctataaccaataatggtattatcaaatctggtggatttcctgaatttataagccaacatgatacagttgttattaatagatacaaaatgaaaggtattatctttaataatcctctcgaaggtgaaggtaaagtcgttggtaacgatggtgctgtaattctcattaacacaggcactcttggggaccaaactttcaatatcaataaggctctatacataatcaatccaagaattgttccagaatcgcttagaattatcaatcctgtcggatctatgcttgtgtttttaggtgtaaactccaatgaatggtataatgctgattatggtaccttaccaggtagttcacctcctaattttgaaatatatggtcaccgttactggttgaatgccacttgtgggcatgcttcaacatggacaagtaattgggcttctgttataccatcagatccactttatcaaattggtggtacatacatttatgtaaattccttttatgagtggtgccctacctgtccgtggatatctgaaacacttacaaggacaaccacgattaccactgaggactttattacacagcctactactatttcaactgtaactacgactacaactaatgaatacgcttttactgtgactgaaattgtttatgatgttgctgtacctgcgctatctactacttataccactactgtcggctctgtctccgttacaactacatcgactacatacactactacatttattgacaatgacggttcatcttctaccgaggttgttgttgtcattgtcactccacctccatctaccacctataccactactgtcggttctgtgactaccccaactacatccaccacctacactactacattgactgacagtaatggttcctcatccactgaagttgttgttgtcattgtcactccacctccatctactacttacactactactgtcggttctgtgactaccccaagtacatccaccacctacactactacattaactgacagtaatggttcctcatccactgaagttgttgttgtcattgtcactccacctccatctactacttacactactactgtcggttctgtgactaccccaagtacatccaccacctacactactacattaactgacagcaacggttcatcttctaccgaggttgttgttgtcattgtcactccacctccatctaccacctataccactactgtcggttctgtgactaccccaactacatccaccacctacactactacattgactgacagtaatggttcctcatccactgaagttgttgttgtcattgtcactccacctccatctaccacctataccactactgtcggttctgtgactaccccaactacatccaccacctacactactacattgactgacagtaatggttcctcatccactgaagttgttgttgtcattgtcactccacctccatctaccacctataccactactgtcggttctgtgactaccccaagtacatctactacctacactactacattaactgacagcaacggttcctcatccactgaagttgttgttgtcattgtcactccacctccatctaccacttacagcagtagcacaggttctccatcttctccagctctattcactacctacaccactactgctggatctgtctccattacaactacatccactacctacactactacattgactgacagtaatggttcctcatccactgaagttgttattgtcattgtcactccacctccatctactacttacactactactgtcggttctgtgactaccccaagtacatccaccacctacactactacattgactgacagtaatggttcctcatccactgaagttgttgttgtcattgtcactccacctccatctactacttacactactactgtcggttctgtgactaccccaagtacatccaccacctacactactacattaactgacagcaacggttcatcttctaccgaggttgttgttgtcattgtcactccacctccatctaccacttacagcagtagcacaggttctccatcttctccagctctattcactacctacaccactactgctggatctgtctccattacaactacatccactacctacactactacattgactgacagtaatggttcctcatccactgaagttgttattgtcattgtcactccacctccatctactacttacactactactgtcggttctgtgactaccccaagtacatccaccacctacactactacattaactgacagcaacggttcctcatccactgaagttgttgttgtcattgtcactccacctccatctaccacttacagcagtagcacaggttctccatcttctccagctctattcactacctacaccactactgctggatctgtctccattacaactacatccaccacctacactactacattaactgacagcaacggttcatcttctaccgaggttgttattgtcattgtcactccacctccattcaatagtttcatgacatcgtcaatgtcagtgtcatctcctatttacagaaactccagtattcctgttgaaaaaactgcaactactttaagtggtaccttagtagtattaactacagtggttcatggagttacaataactacaacttattgtccagagccatctgcaacttctgaaataagtttaactgctactattggacatagttccatcaaaactgtttatactaattcaaagaacgaacaagaagagaccaactcatttactactgctacaaatgtaactccagttacttctattgcttctaccaccactggtccagcatttaccaacaatgaaaatcaactaacatctagaaactccagagaatctaccactgttgttgttggatctacaaggggtaacatagacgttacttcggaaactagtactgttgaatccagaagaccagaaacatcgctaaccacaatgataccacaagtctctcaatatgtttctgagcaattctcctcatcaccaactgctattatggtacctcatgaaggtgtaccttctcttgtgtcatatgaaggtattggtagtatcatatacatgaggtggggtcttacccatttcattggtttattattatttatggtaatttaaattaattaaagacaaaaaactttaaaataaagaattctaaatagttaaataattagtaattactatctaaacatatataatactccaatattatatgtattgtatatttttcttctttatattttgttttcgaattttgttacgtgttttgaccatatttaattagtgaatttagatcagatagcttgttatcatataaatttgaagtcaactgatcgtattttaaaggatagaagatccaaaaaccctttctaattaaaaagattgtaattataaagatttactgttaatttatttcaaagataataataacagctttactacatatgttaaagactattacaatatttctttatcttcactaggattcaagaatttgactagatgagcgatatataaatgagagaccaggtggtcatatatctatttctttctatcttccctagttatttgttctctttcccttatatatacgcacacacaagtatggaaaaaataatatatttattaattaaatattattttgcgctgttaattcaaataattgtatatatatgtgtatgcacatttatataaatatgtaaacttttattaccttcattttcaactaatggttccacttgtacttccttacttttcttttgatatactattccaacctaaaaagaataacatatttagcaatattgtatttacatgagaagaagaggcatactggaaagcaactttcacgatatttgaggaaataaaaggagcttttatatagcaaaggaaaaaacaagaaaggaagagaagtgataagctatttttcaaatacacataattgcatattgatgatataccatacctactatacattttaggaacactatacataaaaaatgtagatacatattctattgtaatatacataccttactgttctgccaatttaccatatttcttttgtattttgttgggtgcagaacttttaaggttttaaaaaatacataagaatttctcccccacacttgaaaaacattgctgtaataataatcattccaatgatattctggatgcttatgtgatcatgatatcaataatgtgtgaacgttcttttcaaatgagaaacatttaaaagtactctaatacattcatattcttgcaaatgttcatgtatagatacagtatattttcttgatttaatatcataatgaaattaagttttgataatcatagatattcacattatatatatggtgggatatttgtttgaacattaagtatttctgatgattgcttgttgtaattggatgtttaacatacagtattaaacattgagttataataatatcagattaattctcgaaatgaatcaaattaactgattaattcttgaatattaaattgataaattttcatgttaatactccaccatagtatatttttaaatgttgttcaatgtacaaagatcgagataaaatttctctctattatattatcttgtcaaacattaaaataagatcatctgagtaaaagacacagcaaaaattgttaagcagggaaagcagtacagtagaatgaaataaagatataatcaaaatataattcattatatcaaatcaatgtgtcttttatcatcattaccataagcattgaaaatcaaacataaattaaattcatctataataagagtagaattagtaaaactaaggatttagtaggatataagaaaaaatcacatacagtgaagttctttattgatatagtataattatatctatgtttatagcggtcatcatgatgtgttaatttcaaaaggctattctctgtgattataagttattataacattatcattcaatggataatgaagtgatgtagaaaatacaagtattcctttatattgaagatattagtaagggatggtgttcatgtaatattggagtatgctttagtagtcatattcataataaaagtggtagtaacacaaaaaatggtcatagtctatcgataaatattctccctagttacaatatatgtatggagcaggttgttttgagagtattctctatagtcaaatataaatgattattaggtatacagtggtataactatgccatgttaaataggggtttgtcaatgttcaaagttataccatatagacatgtaaagtaagtataccatagctgattatttatggttagatgaatctgtattatttacatacttagctttcgttgaaagtagttattattgttaatttttttttcgaactattttttcagattttgaaaaaaggaagattgacaattgaaatttgaatgaaaggagattggtggatagtgaagagataatgatagctgatgttaagagtaattaagtgtgatgtgtttgtgtagtatcattcttgtttaagacataatatcaagagaagttgtatattaatgaggagttcatagtttaagagtgataccatacaatctaccagttattaatgtctaaatgaagtaagcagtttaagaataaaaacataattgaaagtaatagtggttgatatgaacttagtctactatgtataaatccatagtaaagatacatgctaatatcatgatgacagacactgtgaataacattgtatgttatagatgtaaaagagcaataaaatttactaaatgatattaccatcttagagatagaaatgtgggtgtaaatataagatgtgatagagcaaccattaatggatcacattaattcagtgtattatgtttgtgttgtttacattgtttctacatcctacacatgaaaagagaacggtcaaaattcattgacttatttatcacaaaataaataactctatcgttttttattttattcattcgaaaattgtgattcactcatattttgtaatttaaagaaagagatagtgatatatatgtttcagaaactttttagaaagagctcattgttttgcttaccttggtatagtgggtggattaagaataaattgttcatataatcatttgacatggaaaatagtctttactctactcatgggaaaagatatcttagacggtttccagagaactatgagaaatattctgtgcctaataatacaaaattattttccagaaaacaagatcgattcaaaaataatctacatgttctatatgcagtgaaagccacaaatttgaaaaatctgcttacgtttttcatttcaaagaagactttgataaatagatttatgttaaacactataccatctttctactgtttatgatcaagcatttatcctatgaaaatatttaaaatgatatttaatttaaataatcttaattgtttatggaagtataattttgtagatttaacatttgaaattagagtttcagggatgctaatatggtatctcctagaactatagtagacttaaagtctaacgttgttatgttttaagtatttagtaaattggatttctcgtttattgaaaacccatgcaaatagtatatattgtatttattattaaatacatattgatctttcacaactttacttctttcaaaaaaattaccaacgatctaccaaaatcagtttttaacaaaaaagatcttgtgaacatacgatatattatctaattatattatattggacccaactatatcataatctaatattgatagtcagtcatatcatctatcgcaatagatcaaagacctttttaagtgagctttgatataaaatttcctacgtgggttatttaataatcaatttctaatattctgaaagaaaaaataaaaaggaagaagaaactctcgatattcttggaactcgtgcaactattgggaagttggaaatatacgttaccagaaggtactgaaacgacaagtatgtttcagtttataaaaatataggcttttttttttgcaggaattcacttctatgtatatcaagaaaaatcatcagtgaaataatttattgagatagaaaacaaaatcaatccatttataggaggcattacagtgataaaatgtgtttacagttatttcctatctttgtaaattaagagaattaataagataaattggacaataatagtaattattagatgttcaatattaccaaggagtgtagcaaccatatctatatcagcattattattttaattgatatatatatttatatatataaagaaggtcttttgtttgtttgacttgtacaggtgcttgcaaattaattttataaaacattcaagaaaatttagaaataatgggtatttatttgtatatgttacctttatatatatcaaaataaaaagaacaaagcctttcatctatactcaataaaaataattgatgcaaattaaatacacaccacaaatgttaggtaaaaagatacttcaatatgttatttagataaaatttcaaaaaaaaaagataatgtatctttctacaaaagagccatggaattttatctgtaaaattgtagaatattgtttaattattcttacttacacaccttaagtattagagaaactgaatattaaaacaatatatactggtgaagaactatcagctgttattattttattttgttttgagccttgctgggttggcataataatgatataaatgatattttttaaggttttgtcattccattatattcatacgaatagagtttataatagttagttatcaatctatatctgtatcaatttttttttcttcacaagttgactagccaactctttgctaatgtatgtgtttcctacttaatatggttgatataatagaaaatattttaataattataataaaagttaagtatgatacaggaaataatggaattataaagaaagctaccattagtaataatgtgtgttgattgtttttgtaaaaaaaaattagttccacatacttcttgatgcaaagttcttttatattatctatctaatataataatgttaattgccccagatacattctagttcatcattaaagatacggcattcagtagatctttatggtttgtcttgtagctagtgcaggtaaactcaacagttacaactgaattaaaaacaacattattttttttatcaaatatgcagctcagcatgccattttaacccagataggaggctttctgacaaattatacaaatattatctgtacaggtaaagtgatataatagtatcattaaaatacaggcccttttaaagttatttcattgtttgttgtagtacaatatttgaaagttagtaaggaagaaagtatggtaataattgatgaccttatccctattattctcctgttacaaaattaatgattaagtggttattttctttagttaaaaacagtagacaaaaatcaaagtatttaacttagaagggacattattagacaaaactgggctgtttttttcgagtgagtttctcttgacgcataacaatgtgtctgtggtttggtattttgtacttcatgaggcataagactgtgcacagctcctgggtctatgtttatggcatatactttgaagtagttcttagttaacaaattttttctttttgctttgagaaaaataaacaggagtaattttcgagcttaaatcttagcccagcaggtaacttgatgatttcattagcaataaaatatatgcaaagatcaattgttattttagtagtagagattataaatagaggatccattattagtgtttcaaacctatttatatatactcaagatgaatatgagtctgcagacaggaccaggaaaagacagaaaaaaccttaggagcataagtgattatatagaaaagtaaaaaaaatctaatgaccatttaacagaaataataagctataccattgaagtctagttgcaagcgaaattctcctcattaggttgtttaaaatgtgtattcaaatagtatgagattatgtattgctgcaaagaacataaaaagatttgtgatttgtttgaaaaaaaaattgcctcaaattagatagtatttgaactaatatcgcaagttttttgattaaccgactacctgtgttgtcaatttttttcttatcatacgccatgttgattgtctttactatagtttcctgaacttttttttagcatttctagagataaactgtactgtgtggttcttttaagttatgcaatatataatgtaggatacagatacagaaaggatatgaagcaatacctatcaaataatagtgtcaaaatgtcctaagttttctaaggggatgaaaaatactcgctatgattggaagttgcataggatagaattactgacattgcacagattttttttacaagtttaagaatatctgaaaataatttactcatgtatctaactgtttgcttgaaaaacatatgtagcattatcatgaaaatattcgaagaatgatgatagtaactgctctagattttacactacccttttctttttgcaaatttattcttagaaaataaatctctattatttttttcttattttttttgtattaatacagtgtatgttacttatccttctatatttcatcactttgatgacaaacgttataaggtaaatttacatatgtatccactttttttctatatgtaatgaacagttacttggaaatatttgttagatcttccatcatgtatgtcttatatatatatataataataataataataagaagaagaagaagaacagaaatgatatgatgttttggattataatatcctggaacattttaatttattttttattctataaacaccaatattatttctaactgttgggaagtagcacctgtttgcatttgatatctaagctacattttcaactataattattacataaaagtaaaataaagttctttcctttttattacatgtacaatacagaaataataatattcaaaatgttcatagagtatagaaaagcagcatgtagaaatagtttagtttcatattatttaaaaattaaataatccttttctacaaacaacaaaaaatataaccaaataactgtaccaatattaagtgatatgaaaacattaaatacccagcattctaccattttctctctgccaaaatcttatgactctatttattttatcctaaagcactttactttagtaagcattattcaggagttataaaactgattgttttcgtgatttgtaacaattttctttgtactatttctgaacgtttaaattatacatttgagtaaataagtaaatataacgtcgcagacgttggaattgaatgttttagaataaaataaatgagctaattagggtttaaaaagtatgacaatgtaactgtgcttaatctcccacttggttttgtaatttgagaaaatacactgattgttcgttgtgtaacagtaccttgttgattacttataatacgtgtagtagataaactttatatagtattaccaccagtttctctggatgataactcgattttcacagtacttaaagtattcttcttagaggttatcatatttttacttgatccaatacttctacccaaaccatctgatataatgctctcagacgataccattgctacagcagatactgatgaatcccaatataaatgtcttatacttatcgatacaattcttgggatctcaacaatcacaacgtcaattggagtgctgttatcattggagtcagtagtgtaggaggtggatgttgaaacagcaacccttgagctaactgtagctttagtatataaagtgacagtttttggtggaggtgtctcgacaacaataacgtcgactggactacgatggccattagagttaatgatatatgatgtgatagtggaaatggtagtgcttggtatgggagtttcgataaccataacattaactggactgcgacgactcctggagtcagtggcataggaagtatatgtggagatggtggtagttgagtgtactgaacctctagtatatgaggttatagtgctcggtttgggggcaagatcagcttcatagtattcaacaataaccttttgattataacgattatatcttgatgtgtatgtttttgttctagtggttgtagttgcagttaaacgcgacaatgtagttcttcttgttgtggtggtggttgtgtatattgtaagcccagtgaatgaaaaagatatagatgaaaaatcattggggttattatcagaaatactgtaaacattttggtctatagtgctatctacggtaccgtttggcaaatttattaaaatgtctaatattccccttacatagtaattaatatatgcaactctaaaaggataaaagtagccttctttcggatatatttcacgtgaagtttgacccatattagatactacactaccagaattagtaacttgaaaattgccaataccaaaatcttcatcttgactaccacaatcaaaagcaagaccggtacccatgaaaactgaaataaaaccagcagaattagtagttacagtataaatacctgtcattggagctctgtaatagtctgtaatttccattaggaaggtagtaattggaatatctgtgaatccataaggaggattattcaaccttgggcctgcatcccattttatatttgtgatatcagtaacggtatttttatatgttggatcaccacctagaaggtagtcataaaatctaacagtagctctactgataccatttcctggaactgcacatgcaactggtacaaaggctgtgttacctgaagcagctgcaacaaaattcagatatattcgaaagtctaaaattatgggaaaaaaggttctcataatgcaatatcatattgtattatgaaggttgaaaagatgtgactatatcaaaaagaaaaaaataactaagctcaaaaaaaactctaggacacctcttaacctttaaatgaaaactatttttttatgtttggattaacatatggatgtattataggctgctcagtgaactatttttaccttactcaatatatgtactacacatttcgaagaaaagttaactttaacaaaacacctcaaatgagatctaggatcacattcacaaattgcttgcttagagacgatactattttatatctaaacaaccatatctaaagtttttagttcataatatggtaggaactgttgaaattatttttctatttgtggacttttcattcattgatagaaatttttaaagattataataatctgaccaatcaaaattgtcgatgaagaaaaacgatttaaatcataatagaagtatttgtattattctgtaccatgtaagacatatggtatcatatatcattaagctcttttgatgggctaaaagaatctatgctttcttctattgaagaaatagaagtttcttcttactcgagcaagatgatctacaaaaattttcctctgttctttaacgcaattttcccattatctaatcttcgagaaaaggaggttggaaaaaagtagaagttgcctaaaaaatattggtgaaaaaaaaacaattcataaattcacaaaacaagagaaaagagcgcacaactaacactaacacacaaatggccgagcaagaaacaattactttgacttttctcaatagctattgttatttggagtttaggacttgtgaagaacatacttttatgggccattcactttcctgagttttataaacaatttagactaaatgaatggtatcacgacaacccaaatatgaagtttatgttttttctttatgtctagttgatgttgggcatttaccaagtgagtgaaaatgataggacattgtaataacatttaagcgtaactattttattgtttaggtctttaataaaatattagtaaagattggtgtttgatcacaagaggacaattggtgacagtattacacttgttttttttatatattttatagcacctatgcaacttttttatggattatcttttttttttgtaacaatctattagatagtgttgaggtttgtacacgaagaatctgttggaagttggagacttcagcatccatggtaatggtatccatcactaagttatagatgcttgttctattttatactaaatacatgtacatatttattatatagtgtattcagtatacattcttttatttacttcaagttttcttttaaagtttttcattccttttcaaatctctgaaaaatactgttggtgaaaaataaaatgtcttcctgatattatgtacatccgtacaccacataatatatagaaaaactaattaaaaataattcttatgaaaatgacagtaataaactctcattttccaacatgcccctttaattggtttttcttataacttcctcctgttcactataacttaatgatttccattaccagcattccagaggacagtgattggaagcaactctttgggtgttaattcatgttgtacaatcattcttaatttatttatatctttattagtagtggattttgttaatggatctgcaggattttcttttccactgatttttcttagacttaagtctgaatctaatattctttcttttaatctttcaattctaagtcccaaaaatttggttcttgctttaaaataatcttgtttcaaccagtccaatgctggtttggaatcagtaattacacatattcttatgtttttaaaatccatcatcttttctaatttcaattttaatagcaatgcaattttctcagcctgatttatggcatctaattcagcttctgctgatgatgtacataaaattgatgatttttttgaaaatccatggaaaaaattgtttcctaaccatattaatgcaccacatcttgatttaagatcaaattcagatgctagcgaagcatctgaaatcaccgtgatgtttgatatattttctacttcttctcttttaaaaacagtctttgtatcttgtgttttataaacatattttagtatttgttcggttaactcaattacctttttatgaggatataaaactaatcgagccattttacttactgcacattctatatcaattcttcctctagacctaatataatttaatttaccgattaactcttgtaaatatcttactttcttcttgtattcctctttagtcataattaatttatcttgttttggatttattttaaacttatcaatatctggaatcatttcttcttttaatttatcatttaatatcattggatattccttttctaatctctttatatagctagtcatgcttaatgctatctcccctttttcataatcataattcaaatccattcccaaaatatctgtattaagcatattatttttcattccaccaactatttttattgagaattgtttttccaatgtatttataaattcatctaattcttgatctgttctagcagcaattatacaatcatcaacatatgctgctatcattaaattaccatcctttgaaacgaataatccaggtgagtaaatattatcatatagacccataccattcatagactcttttaagatttcattccatcttttagggctttgttttagcccatacaatgcctttcttaatggagtaacctttcttgcattttttggatgttgcatatacaactcttcatttaaagttgcatataaaaatgcatggttgatatctaaagtctttaatttcatcttcttattgttagcaataaccaatagaattcgcaatgaatcaagacttaaaatggatgtttcaatatcattataactactgcttgtttgttgatcgcctctacaatcaattctggctttataagttccatctctcttaatcggataaaaaaagaatttgtacctacgattttatcctttggtattctacttttatctatggtaatattcaaatcaattactttcatactaactagattttttaattctttattgtatgcttcaatgaatttaatcttttcttctaaattttgattctcaattatagcttgtttataaaataatgctctaatctttctttctggaacactttccccccgtgattcaggtgtgaattcttcccatttttctgtaggagtaatataacgaatcatctttttcttcttaaaaatcttcttagggtgtaagtctttattcttttcatcaatattagttaaattaatcttggggatattatcaaaattggtttcttcgaagttgttttctaataatcttttctttaattctttaattttaggtttccttaaggaagtaaagtttttttttgtccagtctgtagtattggttgatttagttaaattatcttcctcttttggtaatgtagatactagtgaaacagattctttagcatcataatacttttcttgttcttcgtcaatcttagcaacactaatatcattactttccagtgccttttctctttctagaacttgttgtaaactgttattttcattgttcttttccttttcctttttgtgttcagtttctatcttccgttttataaaatttttaacattgtcattaatttcttgatgtaatttattattagttgatctcaatgattttgatgatttctttaaattatgtcctatctgacctgttatgtttgtatccattgttgttatttcttcatgtttcaaaatattttctgcgccttcattattgcttaattctatttctgatactttccgttgttcaacattatctttttctttttgtgtgtcttcttgttctatattaagagtatcaggttcctgtagtgttatattgaggtcattctctaagactagttgtttatcagtttctaatttcttttctgttgtatgtgtttcgttaagtttctccaaggcatatgctttactatgtttaaatgagtcttcaataatgtttgttttaatttcttcctgttcaatcttatttttcaatatatccttccatttacttaccaatgagtcttgcatgaaactagcttgatcattttcttgagatttatatgtgctgtttaattccggatattgttcgacaccagtatttttattattatcattataattagtttctggttcatatttgttcacattcagttcatcttgttcatcctgttctgtgtctacagtattttgagaagtaatcagctcttctcctaatgactctcttgattccgtttcctcgctgatatgttcttcttcaacttcaaaatcgtcaaacaattcatctaatttaatattttctatgcttctaggttcaataattggcgttacatcgttaatttcttcttggatgtcatttagtaaatgttctttaactcttatttcatcttcgtgtaaaacatctaccagattatcatgttcattttcaaaatctgatggtaacaatgttactatttcattctcgtcataatcaatgtcatttatatctccaattttgtttttgacctcatgtaaaaatgtaccaataatatcatatcctttcttctcatttaaactgtgatttattgtataatctggtaatatataatttgtggtacttatcactcttttttcttttggtacataaaaataatatccaaaaccttttggatccttggatagtgttatagccctttttcctggtgcttctgtttttctgcttctgtaatcccatatcatagctggggcaccaaatggtatgaatgatcttaatttaattttcactttatgttttgatattttcattaatggtgattctccaacatttttgttatatacgcagtttctcacattcactgaagctttagctgcatatgtccaaaaccttaagggaagtcttgattgtagcaataatgttcttgtgtcctcaataattgttcttatacctctttcagctcttccattagcttggtgatcttcagtagaagtatatataatattaataccgttttcgtgagctaattcttcaactacgtgattgtcaaactctttacccctatccatgattaactctttaacttttacatcgaattgtttttcaatccaatttatattgtatccaatttgttctcctatttcatttttatttttcttgatatgggttgttgcaataataaatctcgatacactatccaccattatgagtaaatatctttctttaacatgctcaacaggaccaaatatatccaagctccaagaagcacctggttccttttgtgaagtgtagtgattcatagaaccagtgtaatgaaagtgttgatgtaatttacctgaagcgcatatctcacaccaaatatttttagaattttttttatcatttatcattttcacatcatcaaaattgttcatttctattgattttatgattccactggctgaaaaatgatttaaacgtaagtgagcttctaaaagtgtaatattaggttttatcgctaatggattaataagtttaactgctctaattatcttatcagtcttcttgacagctataattttatctgtatcgacccatatggtgtttcctaattttaaggttttcgtatcaaactcattttctttgttcactagcgattcatatcctttgtctaaagtaattccagtttcttgatatagcttatttgcagataaaattgttgcatcttgttttggagaatagtatgctataacaccaatcactttatttccacctactttgattggtaatatcccctctccaagtatttctattgggtttttatcatcccctacaccctaatgttctggtccttttattaatggtaaaaagtttaataaccagtctttattgtgcaccagatgtatatcagcagctatattaataactcctttgtcattagttttattttttgagtatgtttttcttatctttttattgttttgtaaggttgattcttttgtttgtattttattattaacatttggtatagtagcagtttcttgtactttggagttgtttacaatgttattattgttgtaatgactaataattttttttttgtattttttgattttgtaattttttttcttgttttttattaagtattttgtcttggtgaaaattaatttttttaactttattatacaatttttctgactcttgtccaattaatttgtggttttgttgtactaggcttaagtctatatttattgggacaattttttggatgatgaaagtttgatctataaaagtcgcaaaattttagtctttcttcaatacttcccctttttatctttatatttttaattgtgtttattattgcatctacatattcatttgggtccatcaaataagagggtttgatgttattgtacatcatatattcaaacaataagtgccttaagttatcttctatggtgttttcaatttttttgttaataaatgagtatgttattttttctggatcagtatcgcgaaagctccaaacttccaacaattgcattttttggattgttctcttgtatttgtatttatcagtacaaaactggtcaattttaatgcgtttccaaatattatcctttaccttcctttgatacatatccaggaattgttctttaattatattatacatttcaatcacattattggagtacatgtcaaagttttagatactcttgtctactgtgttttttaaaattcttttgattatagcattttcaatgttagaaattttgtcttcaatttttagtttggtgatatcatccgtgttccattcttccaaaaaacctttcaattcatttgcccattcagcaaagtcttccattttcaatagttttggaacattattttcattgacttcaaaataaaatttattagtttctccatttaattttgaaaattcataaaattttccattttcatcacttttgatgaataatatgtttgataatttctttttattcttgactatattcaattctaaatcttcttctttaacatgattagtgaatttgaaagtatttgtttcatagttaatatttgttgtgttgtcatgtccatcctttgtgtagttttcctttatgatttttatttcgttttcagcttcttaaataatattattaagagtttgtctaatgttttgatatttctttaactctttgtctaagtcattaatatcgatattatcatcatttagtaagccattttccttagcattgatttgttttgattttttatttaatagttcaagtttggtttgaagcaactctagtcatgattgagttctaggatttacattggcgaggctaccatgttggaagttggagacttcagcatccatggtaatggtatccatcactaagttatagatgcttgttctattttatactaaatacatgtacatatttattatatagtgtattcagtatacattcttttatttacttcaagttttcttttaaagtttttcattccttttcaaatctctgaaaaatactgttggtgaaaaataaaatgtcttcctgatattatgtacatccgtacaccacataatatacagaaaaactaattaaaaataattcttatggaaatgacagtaataaactctcattttccaacagaatcttaccataataggaagaatataaggatttgtacatcctcagttcgtgaaagattcgtaatggattttaaatacgcaatttgtctatggttttctaaattgatttttaaagtatcgaatagcagtgactttatttagggtcagtaaatcttttatttctttttttctccttattttcaaaagtccattcaactttttggatattcatatttttgttaaagttgtttttttttgttttcttgggtataacatttctctgctgtaatttgtcttagcttagattaaaagaatgatagacaacaataagatactaactggatttatatcgttacaattttggtagattaatttcattttgaaactagtttgagagtttgttctcaataataataaataagaaagaagagagagagaaataagatatagttatttatatgtgtttgttgtgataatatatgcaaaacatgtaaaaaaaaatagggaaattttaatatcattaatttatacaataatttttactaatagattaaaaacagatttcttaatttatcgcgtctaattgaagttgataaatgaacaatatatatttttttctttcagtttctagatattataaattactttgcagtgtttaaacaacgtgcacaatgaatcaatcagctttagaatttaattcacatatataggtgtaaattttttttgagaaatagggaataattaaaatagaaaaatgcaaaagactttttcttgaataaagaaagaaataacagattaccaaaaaaataacgttgtttttcattagtgatataaaagagttaaagaagtatgatatatgggaataagactgtatagatttaggaactggacaattccttgaaaaaatatctgtataatgcacagtttacagtttgtaaaccattttatgcagttgcataattgtatataataaaattgtcaaaataagatgtttttaggttgaattaagtagaatatcaaggttttgattgatgttaaacagtatattgctaaataattattgtttacttatgaataaatataaatgaaactatttggttatttttttttagttgttcccagaagaaaattaatcagtatattcaaatatacaaagccaaatttctttttgtattattttttttatttacaggttttatttcttattgttatacactgttataattgttaagaattagtgccattatttacttaatctgtagtacacattctcaattattattataacatatttattgtatataaaactgttagaacatagacagtatatctattaggtttctctattaaagactgttttattatgtcgttaataatgagaattaaaagagaaaaataaatatttttcaagaaaaattttaagagaatcaaaagaagagagatcaatttatatttatctataaacttattaacttatctatattatatgcatagctttttaataaaccggagatccaatttattaataagttaagtcataactgtattaaatacaaataccactactttccaagaataactatatgtaattgttaagaattagtgcctatagtaaatgagtgtatagtaaacattcttaatattatattagatagatatagtatataaaattataattaggttttttggtttttttatttatatataatatataagggtgactataaaagataaacaagggaagaaacatgatataaaaaaagcgttggctttatatattttcatatctggtacatttcgtctacgtacggcaccaaattatttataaggtttgtttatatctattgataagcaaataatgcattatccacagttttttatcaatttaaatttgctacaattgaattggctcagttatttattttagaatgttcaagtttagcggtaatttcttccatcatcctctgtttgtgcaatacaaagataatattacagaaaaaatctgtaatgataaatatataatgtaaaaaaacttttgttttatttatgttaaaattcattttttttttaacacacagcaaaaatttattaatttgttttgtctaaaggtattaataaataaacaatatgttctttgcattttagtatagatttatatttgcaaaaaatttaatttgtctatttatttactctagaatattcgattttagcatatatagataataagaataaagaattttattagaattttgcatattattaaccacataataaatatcattgagaatttatttaatatatcaaatgtatacaagtgataattcttaataatatttgttgtattttacctaagagatattagtataataagaatgaaaataagaatataatttatttattattcagaatcagcaactgaaaattttgtctgtatttatatataattagaatttgtatatattttgaaatttaaaaggtgtagagtaataacctataagttataagggaactttatgaaccgtatttttataagtaatcgctcacagtattaaataatacatatattatatacaaaactatgtattgcgtatataaagtcgtgagtaaaagaaattatttctgatttctatatcttgaccatttatacttttcagaaagataagtttgaaaaaaaaaatttttcacaaaattttcattgagtctgggtaatatctcaacaatataagtctgttatttatgttgacgcaaggcttcggaatcaaaaattctagtagagttcattttaaactaatataatacagtaatgtaacttaaaataggatattggtggtattataagttttattgttatttatagtaggaaattagtggtactataaattgttattgtattgcttggtctttttctttttacataagtaatatacaagatacgatattatacagtatacccattttatcttcgaattttctttaatataaattttcataacttttaatcacttagtatggtgaatttagattatcaaacataactctaatcatatttcaacaatttaaaataaattttataatatcataaaattttttttttttgaagttagtttcttataagaattgataatttttaagttagagattttttacatgttttttaaataaatataaaatagtctccaccatacacaaaaaataagcaaacataatataagtatacagacaaataccagaaatatcaaacaaagatatataaattaatagagtttaggacttccactgcaattatgaatcattttcattatcaaattagaaacttatttaatttttatttagatttaatatgtatacttattagatattctgtttagaatacattatattattgattttaacactttttacttaatttatatacacaaaataaatatatatttagaaaagtgttacaaaatatgattataagctttaaaaatattatctttttctatatttctcaattaatagttttattaataacattcttgtctttccagggagttagcagcacttttgggcgtgtggcgtagttggtagcgcgctcccttagcatgggagaggtcttcggttcgattccggactcgtccactttgtttttgtaattgtaataactataataaccctgaggttatgtgtttctgataacagtagttcttattaaaatctcaataatatttccacttggatagatataagatatagactctttctatatctctagatgtaatattcctatatatctatatatctatatccctaatctaaggtaacctgatagtatacacttatgtactatatatctctacttaattaatccttggttcctttttcttcttcgtcttatttgttgttcgttcttcttcttggttgctctcttgtacttatgttggttactcctgtttttatatgtgtttgtaaaattttgcaaaaaggaaagtgtaggaaaatatcgtcaaccctcatttttctaaacaaaccctaaacaataatatcaggggtattacagtatttcaggatgaaatcctgctatcattataatgaacccttttaacttcttaaatcgatatcggctgtcttattttttcttatttatataagtataagactatgtatgtttgtctatgttattctttatgtggagtatagtttatatagcgtatatggaaaaaagactagagaatatctatctattttaattatttagaagagtgtatccctcgtaataggctttcatctattacagcctctaataatagtcatttcagtaatagtagtgttaacaataattcacttgatcgaatataagacataatattagaatattactacactaatataattaagtaacacataatatatatatatataatttcctattcttgtttattcttggttattctctgttgacttcttgatattttttatcaattactactgcttatacatttcgcatctttatgaaattttatatgtcaactgttatgatgtattatctgattttctgaaaagaaatgaccaggaaaaatatagtattcagaatcccaaaatattgatgcctcaaatagcataagataaagacctattaaaatagataatgttattgtatgagccaatattgataagaagagacataagaaacagtccccctatgaattgggcaatacaaaagacatggttctctgtctttcatcactaaatataggatttaccaatatctttccaaagaagccactatctaacaaacttaaaagtgtttggtagattcaaattttgaacaactattgaagtggtgaaaacaataacggtatcgacaacgatatagttattgttactaataattttgactgtaatgcgatcttgaatgctatttaaaccactactatcaatagtttacagaacatgagccaactaaattcatctaataattcattgtcaataatcaatctcaacggaaatttttaatagatgaaaaaatacaacaatcaattttccacaagtccatatgaatatattgcataatcaaacaaacaatacttttcatggaaatttgactatcacaacttttaatatagttaaaacaataaataacattaatttgctcaatatttatcaaataaatacaacaggtaaagctgaattagatccaaataacccaattattggaccgaacaacaatttgatcggtaatggagtaaataaatcaagattatccatgctttcttctcatataaacgttcaggaaaaaattaaaaagcttttatagacaaacagcaattctttatcagtgctatttactgccagtatggaattttcatccaatcatttacatatgttttaaagagtgaatcagatgacaaaaattgccatgaaagaacaattccttaaagtgataaaaatttatttaatatacaaaaaaaaggttttacaaaagttaaaaatagtaattaacaatatttcatatgaactagaacaaaataaaataattgaacaaaagagacaagaatatcgaaaaaaagatcatttggaaatatctaaagaaaaacaattcatttttcatgtattaatatcaattacaaatgattcttcatcatagctatcacagaatagtcaaataaaagcatctaacaacagtactgacaatcattataacaataatatcaagaataatagtaatgccctggttactgcaccagttacttacctatttacaaatataagttccaataatcaaaatgtaaatgcaacctctatgtaaggagctctaactggaaatcctaaaatacgtaatctacgggtaatgtctaatatcgaagcgaagaactcggaacaactgaaactctgggcccaaggttgtgagtgtgctcgaacgaacatatgatcgtcggatagacattggtggcgaattattaagaagcttacataagagaccattgattcttgagagatagtgccagaggtaattatcagcattaatatttgtaatctatctaacaggttaatcgaatagaataacaagacgaacatccaagactaatctatctaatagttagaatcaaccaattatatgatttgtaagtgtctatatatacaattaatatccatattttagtatattacttgagataacccttacactatattaagtttgtaagtaataataatgataaaagttccatagcaagttccaaatatgttaaactctgtccctggattacacatcctacaatgttcctattttgtcccttttaggaaatatatttgtggaaacaacaattttgttttaaactcaaatgaaatcaaaaaatggaaaaaaattttcacacaaataatcgaacacaacagccattattagtaataaatagtattctaccttttcataatgacagtacgaatgaacctctatcaactgatgatagaattatcaataattctaatatatctacgacatcattaaatgatatcctaaaaatgattgattccactgatacataagtgatacctgctgctacgatcacaaatgccaactctaaaggtagacttactagtatattggatccacttaatcttaaccatttcatatctccatctttgactactgatgctataccatagtcaaaaacaacaactaaattgctataattccaagtagtgaatatattaatcaaacactaacaaagatattgctttgtaataatatgaattataataatgacagtcgtagtaatacaggaacaaagtacagtttaatatgcactaatccaagcacctattcacacaataaggattttaaagttagagttttggaagttgaagatggatattaaggaaattccagcactcaaaattaaaaataacttaaatttaaaaatcataaaaatatctaacacagtaagaacgattttggaggaacaagttcatggaatcgatgagaattcgtaaattctagctttagaggaaaaagtatggtaataaatagagactaacaagaaatagataaatttttagtcatgcatgtttatataaatatattttaaatgggattgacaatggaatgaagaaagctaatgagacgataaacatattagaagatcggtgattatgcagagatgtaaatagaagaagtgaaaggacacgctactgggtggttacaacgatctctaaacggtatttaatgctcatacacacacacacatatatatatatacatatatgagattttgaaagagaagaaaatctataaggatattcttatacaatttggagaaataataacgttgcataaaatacaaatacaaactataatatgttgaatttttaaattgaaatgtatgttaagataattaaaaaataagaaagtaatgatacttttactaaatttcttcttcaaacaatctttgccattctagccccttttgacaaaatctgactgtatagatatttgttgaagcaagaatatatacaaataaaaaaaagatgatttttttgaacaaaatgtttattagtctatttgtctaaagacttttgttatgaagactattgtagatatgttcatgatatttattgtaacacagtggagtaaaaatttttttttgctaaagttaaaaagaaaaaaaaaagttacatacaacatggtacccagtaaaacatagggtatagactataaaataggccattgtaagatttcgcccctggaaccaaaaagaagtagtaattttgaattaagagctagaagacttactttagaacaaggagaacccctcattatgttattatatttagaactacagagtacagaaataatttaataacgttaagttaagtcccttcacgacaatgtgagcttagagatcacctatgtctgtatatacaatttgaatatagacactattttcatgtaaaaaaaaaagttttcactgacaaatatgaagaatcattattgtataggtttaagcaatgtttaacacttatatatcaacaactaatacggacagaaaagaaaaagaagaagaacgaggaagaagaagaaatgtatatatcagaagaatacaaatgaatcctttgataaaagtgacaaacacactaacaaaattgcatatcaatacacgaatgagcctatataaaaaccagacacatatacagatgcctatatattacttaatgctcctattaaaatataaaaaatattgcataagtttccacaagtaaagtaagaaaaaaacaaaaagtaaagaaaaaaaaattgaattatgttgttttctttctttgaaaacactccaagataaatatcccctttcctctcgcttttgcttcacttcgatgatgataccgagtaaataaatcagtaaaaagtaaaatctagagatgcatgcatatgctaatttttttttgaagtttctacaattatcaatgatcatttcgaagttaataatttataagttcgtttattttacacagttttctgtaaatctataaatctataaagaaatcatccagaataccttgcttccaatcaatcaataattaccagtacttcaacattaataataataacaacaacaataagtacatcacctactcctgtaacattatggggtaggaaaaagaacaaaacaaaacaaaaccatcaactattatatttagaattaagaaattaaattattatagacgaaacaaggaaagtacccaaaatagaaaagtttttttttttttaaaaaactaaaaaaataaaaaaaaaaagtacaggccctgaagaataattaaccaaccattcgtctcaactaactgtccataattttaatgtttattatcattattgttattattattattttgcccgaaaactacgacttttccaactttagattgggacacaaaagaaaaacataaaaataaaagcggggaggggggaaaaagagaaaaaagtcctaatttttttatttttttattctgttgtttttctcttccgtctattgttaaaaatccgcttttttgtccatttctaaaaagcaaaaattaacccccctattaaattttcaagaacgcggggttaaaacatttgatctttaataaaactaagtaatggtaaatagaagtgaaaagacaacttgtaatttcttcttttttttatcaacgacaagggaaaagaaggaaactgaagggaaaagggaagataaatctaagattggaaaatcaaaaaaaaagaaagaaagaaaacatatacagaaagggatctgacagatatatcccaaaacggaaattgaggtacagcttcattatctgaagagacggaaaaaggaggaaggaaaagggggaggcgaaagcgacaaagaagaagattaaaatctcatatggtctgattttttgattgtattatattgtattgtattgtgctgttttcttttatttttattttactttcatcgtttttggtttttgtttaccccagaatttattataagcaatagtgcggttttccaagaacaataacaacaacaatagttctctgttttcttttttccagttttgtttactttttttcaagaaagtttgtcaacaaaagaaaaagcacaaaagaaaaagcacaaaagaaaaagcacaatagaacaaacacaatagaaaagagaaaataaatatagtaactaacatcaactgatttttttgtgttattttgtttagtggaagtcgagagaggggtaaaaatcgacacaggagggcaaaaggggaaaaagagaatggaaaaggaaaggaaagcaacacagtgaggggtaaaaaacaaaaaataagggcagttctcgaaggaacgcaaacaaacagaaaacaaacagaacacactacgttgcctgcgatcttcaatctgtcttccaatcgatataaatagtcgagtttttctttctcgaacacgacgatctgatccccggtcctctcatcctttttcgttgtccctttcttttctcccttttccatttccctctctcttcctttcccttctcttctccccttgtgcatacagaaaaagccagcaagacaaatcagtatcggtttataaatataggatactaattcagcttcagcttagcaataatcataagaataataaaagaaaacacagaatggttcacttaggtccaaaaaaaccacctgcaagaaagggttctatgatcgatgtcccacaagaattgatccaagcctccgctgccatcgaggaggccttcactgtcaagactgaaaaattaaatgccattgtcaagcatttcatctctgaattgaacaaaggtaactccaaagagggtgggaacattcctatgatcccaggttgggttgtcgattacccaaccggtaaagaaaagggtgactaccttgctattgacctgggtggtacaaacttaagagtcgtcttggtcaagttaggtggtgattgcaccttcgacaccactcaatccaagtacaaattgccaagccacatcagaaccaccaagaaccgtgacgaattgtttgattttatcgctcaatgtttgaaggacttcgtcgaagaaatctaccacggtcaaatcaaaaacaagttgccattgggttttaccttctcctaccctgcatctcaagacagaatcaatgtcggtatcttgcaaagatggactaaaggtttcgacattccaaacgtcgaaggccacgatgtcgttgctttattgaacgcatccatggctaaattggacgtcccagttgaggttgttgctttgattaacgataccactggtactttggtcgcctccttatacagtgatccagagactaagatgggtgtcatcttcggtaccggtgtcaatggtgcttactacgatgtcgtcaaggatattccaaagttagagggtaagttggccgacgatattccaccagaatccgctatggccattaactgtgaatacggttccttcgataacgaacatgtcgctttgccaagaaccaaatacgatatccagatcgatgaagaatcaccaagaccaggccaacaaaccttcgaaaagatgacctccggttactacttaggtgaattgttgagattagccatgctagatttgtatgaccaaggtcttatcttaaagaaccaagacttaaccaaattgaagaggccatacatcatggatacttcttacccagctagaatcgaggaagatccattcgaaaacctagaaaacaccgaagaattattacaaaaggacttaggtcttaaaaccactgttcaagagcgtaagatcataagacgtatctgtgaagctatcggtactagagctgctagattatctgtctgtggtattgctgctatctgtcaaaagagaggttacgaaactggtcacattgctgctgatggttctgtttggcaaagatatccaaacttcaaggaaaaggctcaccaagctttgaaggatatctacggctggaaggaaactgatccaaagaaatacccaatcattattgtcgatgctgaagatggttccggtgctggtgccgctgtcattgctgctttgactgaacaaagattatctgctggtctttctgtaggtatgaaatgaacaatattgtagatttatgttttatatattagtttataatgatgtaatgaatagtaataaatacaacaattcccaatatttcataaacttttttgattgtttttctgtatatacgtacaatcgtacgtaagtgtatatatatatatatatatgtatattttggatgtttgttgcgtctccttcaatcgttgaatgggatttacaaatacaaacttgaaacctcttcctaataatcaaaaaagacagaaagaagaaaaataaaaaagaataataagtatatttggactaacaaccactacccataagcaattataaatagtaccgtcattattatatacttgtatttaaatatatacatatataaaataactatacaattgtttcaaggttaatggcatagttcattgttttctttatcaaattcagttgtatcaatttattatccacctttgtcaggttttcagtaattgcttcttcttcttcttcttcttcttcattgtcttcattatcaataccatctaattgttccttgttagggaaataaactattgaattatttatagtccagcctttctccagggcaaaatgctctgcttgtttttcagtgctgaaaaataaaagagttttaacattaatcaatggcaaactagtatatgctaattcagtattcactgcgatttcctctctaatagcatccatcaaagttttggagaaaacatctaattcagggacagcagacccagcttccaataggtcccatgctttttgataagaaccttccattaaccacctgtccactttgattggatacgacaacagctcgtcatcttctaaatttttgatccgtttatccaaatattccaattcagagtggaacctagttacatcaccttgagatagaaggatcaatagatacagagagatcaacttggatttgttgtttgagttatttaatgcctggatatcattgaagtaaaattgtctaagttgtgcaaaatagttctgatatatttcgaatttggatagatagatggacgtcaatgcacctatttcaagaatctgttttgtgatatttagatcgttgatatagtcttgagtcaggttagtggagccttgaaggttagggattaaaagtttatgtttaatcaattctactttaattggacccaaaagcttttcacaattttcgtattctttattattgaacgccactgatagacttttaaccaaatctggaagagcaatggaggacatttttcggttagatgtaaacagtattatgctggccttaaaatatataaaacaggattaaaagcgaaaaaaaataataaaaaaaaaaaacaactaattaacacaagaatagaatcactttctatggtttccttgtaacatgactataaatggatgataaaatgctgataagacacatcacacatgtacaaaagtgatccttttcttccacttttcacacctcttctctttttattcggaccaacagaaactaagaaagaaaaaaataaaaaaaaaaaaaaaaaaaaaaataaaatacgcaaccgatggtgttaccctgaaacaaagcaaaatctgtgagtcccaaagaatcttttctcaacctccacaaaacaaaaactacaagatacaattccaataattgaaatgaaccaatgaaccatgttgttgtctgtgtgtgtatctacacatctccaatgttttttataatgtatcgtcttatatagaatatgtacgtgatgttcttgtaatcccatcgctcgctccttctcctctcattgtttagtaacacgtgcatatgtacatgcatccttatatatatgcttgacattctccacattcaatcctctttaacctgcacatgaactttgactctttcaatgttcccacgcgacagttttcttatcttcttctgtaacgtgatgattctggcacggacagacgcacttgtcttcaaatcatctttgcctatattcactaacacctcatattctgttggataatgttcattgccatcggtggatagtgtctttgtttgggtcaatggaggtatataatcatcattttgttctttgtttgttcctatagactcacttaatgctaattcttttggtaacgattcgttgtgtgtacctgctgaactatccagcaatgcctcatcgattaatagctccttcattttcttggtggtggattttaatctacagttatttccaatgacttggaaatcgaaaacattatctctaatattcccacctggatggacaccacagatcacatacattatagtaccaatatactttgtccaccatactattctcctggcttgcattctattagagtcattcaacaccaaattctccaaactttgcatatacaattcctctgtctctggaatgttgccaccccatctattacaaagtgcaatcccaattaatgcacgaatcaaatgtgatatgccatggcatcctgatattatacccgtggtagcgacatgtaatgctgcggtaggttgtaattccttaggatatgaagcgtgaacaaatgctaaattacataacgcaggtgcgatcaagtccactacaatagatggcactttgttcttagggatagcggtcatcaacaagtctagatacttattggatagtaatggggcataaggtcttgatgctaccactacagggttttgagatctgatgtcccttggaagataggaataaagcgtaccctctctaaccccaccttcactgaaataaactgttttaatctttggaagaacatcgaacaatgctgtcatcaacactgacactgcaggtagttgtaaagctcttttctctgatactttgaagaccctttttgtagttttgcccaatggcggagatggtaatttaccctttaaaaacagataatcagtcatggattctaattcttggaatgggaccgaagtaccgttgataatagtttgaattggataatctttattctgagacaataaaagatgtcccaaacttcgcaaaccaccaccacgcatccaaagatcgattccaccattttttgcagccatatccatcatatcccgtgggatctcccaattttcatttatctgttttataaaactagatttaatttcattgaacaaggtaattttgttttctaaacgtagcctcttagtgatcacacttgcaccatacggcaaagtgattggattatgacaatactcgatttcgcctgagccatttaagttacatttaacccaggataattgcacagatccaccagtcaaatccaaataaagtccattgacgtcgttgaaagaggccacaagactatatgtggtgatccttgtctcttcttctggggttaacacttccacgttccagccggtgcccttccaaattgcagtaataaattggtctttgtttatggcaatccgtgtggcttcagtggcaatgactctaacgctttcctcagagacaccgaaatcttcacagatcaatttaaatcttttcattgcgttgacaatctctgagatgatatcattggggattggaatctgctccagcgagtccttgtaagggaactggatttcatataaagagatacctagcctatctttaaagacacaaggcattatccttgcatggtgcgaggatttagaagatatggagaatctaatgccatttgtacctatatctacaattccacataacgaacgtgagattaattctgtttcagtatcagacattttcagtaattctctggatttatttatttctatagaagaagatattaaaaaaaaaaaaggaaaaaaaataagaaaaaacaacaacaacaacaacaacaaaaggttactgtgtatctttaagtacttaaaaaccgactttgtttctctgtagagttgaactaaaaaacacaattaagctcttatgttccttcatctatcttcctctatctttctctattttcattttacgtaggactttaaaacccgtgggaaaagttccagaagaaaaagtcatgtcgtctttgacgaatcgccataacaagaaggaaattaaagaacaatagcaggagaaaacgcttgtggatttcgagagtctgggcggctaaaatcgcaaattgtgcagaagtgagaaagaaaagaagaaaagatgaagctatggcggtataaacaatgaagattgctaatggaccacagaagaagaagaagaaaaaaaaaaagagatgataaaaagagatgataaggactggtgtatgtatgtatgtgtgtatggagaaagttaaaggatgtagactagagtatatgtgtagttctgtaatctgtggctctgtatttggatgatctttgtcgatcttcatgaaatcttgttataagagaaagagtccccaacacctccaactgtaacctcaccacaccgctactttccgaagaaatcgaatgcttgaacacccacagcgagtaaatcccgtttagaaaagggaggggggagcggaaaaagaagcaattcgcttcttctacgaatctttatctttgccctcttctttgtgcggcctgttttttttttttttttttttctttccccgtcgtacaaccctaatcggtgcgtcattgttgacgaaaaccctaccttccagaattgtgtcttctcttttcagtttcttcaaaactgctttttctttttttgtgtgttttggacttttaaattttggaggaaaaatgaaaaaaacaaaaaaattacagttttcaagaaactatacagtaaagtaaatgatcaacaaactgataaaggatagattattgcattataacccaatctctattctttgaaataatagtaatattctccccccccacacacacacacatccccccccccctctctgtcaaaaaacaaaaaagaaaaaaaaatggttgttttggctgcatctatcaccaccgtccaagggaacccaatcgtatcccgtcaattccatgacatttcaaaggacagaatgttggagttactatcgaactttcaaaacttagtctcaaagggttccaaaaaccataattttatcgaggatggccatatcaggtacatttataagccattggacgatttctacatcattttaatcactaatcgacaatccaacattatccaggacctgaaaacactagatcttatgaacgattccatcatcaactacttgaattactccaacggcaatatcagtgaatgggaaatctttgatttatccttcgatatcatcaccatattcgatgaaattatcatcaatgggggctacaaagaaaatttgaccactcaacagatttccacttatttagcaatggaatctcacgaagagaggatccaggaaatcatcgaaaaaaataaagaaatcgaagctaatgaggaaagaaaacgtcgcgctaaagaaattgcaagaagagaacaggaaagaaagcaattcggtgggttagattatcctggccaatcctttgtcggtagcaatgatccaaatgtggcaaacgcgttgaacagctactacagtcatgcttctccagcagctcaacaatcttacgttaattctcaacaacaacaacaacaacaacagttccaaacacaaatttcatcccctactgaaaatgtcactaaccgcatcggtggtatgaaattgtctcaatcaagaaatattcacaaaccatcagcctcaggaatgggcaactaccgctcatcttccaccccttcaaatgtcagtgccactagaccagagacagaactacatgttgaaaataacggtatcttagtcacactaaaggagtccattcaagctcaacttacccgtgatggtgacttacagaactatgaattaaaaggttccttagatttaagaataaataatgaagaatattcacatgcacaactgaaattagtctctccacctttaaacatcttaaaggatcgttcttacaagtttgaaactcatccaaatattgataaaggtgctttcttatcacaaggtataatttctttaaaggataaagaaaaaaaggcattcccagctaatgatcaaagccgtagtgtactaagatggaagaaaaacatcacaagtgataacaacaacaacaacaacaacttaccaactttaccactatctgtaaatacctgggtttcagaaaatgatacaaacatatttgatgtcaccatcgagttcgaaatcaataatgataaaattgagtccttggaagatttgtacttcgttgtccctgtgctaccaaccaaggtcgatgttcaattgaatgaggaatcaaatgaatgtggcgctgaaattacatccattaatgatgaagaaggtatcgttattaaagtttctaggatcgaagctggttctcaaggagttatcaatttcgtcgtggatgccgaatttgaagacgctttattcccaatttccgttacattccatcataataacactgatctaagtatcgctgataagacaagtttaataggagtctccgttggagaagtcattgacagcctagacggtactacttcattaccatacgatgttatcacttcattgaagactgatcaattcactgtaatgtaatcgaacaatactaaatatatatatatataaatatgtacaaacaaatctctactatctctattaaaaaaagacataatttataaaccaattttgacatttttcataatgttaatttgtgttttttgtttttgcacattcattacttaaatctgatatatatatgtatgaataatgtcaatacatgtcacaaacgaatgttatcactgtttagaatatataagtatacattttctttcctctcttatatttttgcttattcaagatatacagggagaaagagaggaggaagaggaaattgtggtgcaactgaaatatatatatatacatacaaatgcataatattctaatcagttgtttacaatgcaccaccaccgttgataacctcacactcatccatttcaataggtttaaattgatactcaggaggcaatttgaaaacagaatctacttcatttggctccagaggtctcgaaacaaaggaatacggacctttgatctgttgcacagcagccatatatggcttaacgacaaatggcaattgcttctttaaaaattcttgaattggaacacagtctgtagttccgggtaaaacaccactaggactacacgggtgaggttttagtttgccctcgattgttgatttatgtatcactggatgtcttgtaccaacaaatttgatacttggtttataatgagtagctaatctaacagaagtgggtttcattgtgtcttgcaaaataatcttaggagttgtttttagtgaggttgttgttgttgctgttgttgttaaagatagtttagttgtaggatgtgtctttaaaatacgagaaatacagtttttggtatagactaatagttctcttaatttcatatcacgtatctgattgcaaccattcgagaaagcggtcagaagaatgtacaagatgcgagatgtaagaagtattagagaagaagggggaagaagagagtgtagcgtcttagattgactccctatcttcagttcctctatataaatcacttcttttcttcgattttcatttgttcctttcatcactacgagaagaaagcaaggcaaacccccccccccccaaaaaaaaaaaagaaaaacacataataacaaaaattaaggcagaaatagaacaaaaataaatcgggagaagagcaaatgagagagaacttcaacgaaggttccaataagatgagatgtgtttcgattctgattgaaaccccaagagactgctctacaggctgcagcacacaggtattgggatactgtagttggaaaaccataacataactgttcatgaagactagtttggtaccttttgggaagtcctttggaaatagacttaatggtaataacaataataaaaataatgataaatctttcgctgatgagaaaaatgtagtgacttcactcccacattctagatattggtatgagccagaaccgttaaaccaatacatcaagatcatatttaatataattattaccctagcaattttatttatcttgtataaattcgttcacttaatctccttagacgttgaatggaaattaatggaactggagttagattctatgaatcaatggagacggtgtgaattagattacaaaaacaataaatgttttctatctaatgaggcgattccaccgaaactgcgatataaatgccaagaatggtcacattgtattgaacaatattcgcttaataataaacggtcttttcagtcagctaagttgtgggtacagactttagctgaggtagttaacactttcattgaaactatcacattgagatctttactgtttgtattaataactgtgtgttccatcgttatggtcacaaatactatctttggatcttataaagtagtttactataataataataacaacacataacattgttgtcctttccctttgtctttgtttaaaagaaggaacatgcctgcatacatacatatgtacatatatgtatctaattagttacttaatgatagatcttttgctgatgaatggataaatctaacatttattctcctattttctttatagttgatatagttcaaggaagatagacaatcagctttgaacctttcctgtattaccaacttttcttttcttttttttgatgtatatgtgtaatatgaatagacaattattatttcataacttacttgctagagcatacattttaaaatttcaaagactgtctccattctttaaactctggatcaataaaattaggattgtttatcatttcttcatactctttcgtgtcgacagcaatacactctaatattaattctttcacaccactagttaacctataacaactaatttcttttcctttactatgatctgatatagtgcttttcaaccaatctataagacatccataccatttaatagaatcattaaattgttgtctcattgaggaactcaccaaagtggggatctcttcagttcgatactcttcaatggttttcagttgatactgatcatcacgaaagccgtaaattacatgaggaatccccaccaaaaaacactgtaaccaagtcctaaacattttcttttcaaaatttaaacaatctctttcactttgaatctgtcttgtgcatttcaattcaatataatgtgtgagtttactatcatcctcatctatactaggttcaaaatcatatattgcatcaatctcagctccaagaataattttattagacccgattcctgtccccacaacagtagcatattcatttccattagtaaccaactgactaggcctcttttcaatggtgttcctatccaccaaactaaatggcttcggtattgtaaccaatgtctcaaatttgtacccactaaaggatcccaaatctaccccataactggtctgaatcgtgttagaatcatatttccttaaatcactattttgtatcacttccttaataaatatctgaccatcaaaatgtattatctgcaagttaattggatcaacatactttgaatcttcaattgcgtagcttatcaattttcgtattatacctcgaaatgtgataatatcagcctttattcttcttttaaattttttttcagtctctcttacagtatctaataaacctttcaatgaacatggatcagaaatgaccatactacgatcttgaaattgcctccgcccttccatcaaatcaatactttgatttttatagaactcatcgtctgtgaaataataataagccaaatttctctcatcattcacaaatatttcatcgtcaatagttcgagaataatatcccaactcctttggtgttttcagttgtgtcacattacttcgcttatcaacagataatgaactaatttgcatggctttttgtcatataggtaactgttgctagtctctctctcaatttacaattcttcgtctattacagtattgtgtacaattcaaatttttttattcatttatttttgtcttcttgatttgatctagaccttctttcttcatagtacacatcccctctgattacaaaagctacaaccacaacacactcctctcaatactttgtaatccacaaacttcatataatcttacaaactgatctccctatttataaaaatatatttatataattgaatattaattatgaataatactgtatctaaccattacttcggtaactgaaaagataacccccacaacaatcattataataaaccaaaacgtgactctcgcaatgttcctctctgctacagaatccacacagatatcaaaaaactctagaaacactttacatctatcattgaccacagtgactcttttgtctatctccagatattctctcatggcaatatataatggatgtaaactaggttctacagaccaaaaaaaatcaggtgtatctaacacatttgatgagaggttaacatctactctcaatttaaacaatttacctgacttctttaacaattgtgctcttttcagacctaaagtcccatgtaaagccaatctcttgggtaacttcataacagaatttaaaataggtgatattctggactcaaatctagataatttggtggattgggctattgcataagatagagtcaatttaataaaatgatccccggatctcaatgtgatcacatcattaaaaatccttggtctctttgtgtccttatcatactcaaaatggaactcttctgtttcaatatctggttcatctaatggtctaattattaatttcttttcatccgcaaatgctaaatccccaagcaaatccttttcttgatcttcggtaaaattccaaaatactattacaccatagtggaaaataaataattccgcatgtttgtacatattttgattaataaatctttttgtttcagcctctgagataccatttaacagattactatcaatatttttgtttgtatcaacacccttgctatcactttggttgtgaaatatggttgatgcccttttacctgatataacacctcccattgagtctcccaagagattcggcgatgttgataaaggactagtaattttcaacaattcttctctttcacgaatctcttgttccaaaggagactcttcagcaaacagttgtggttcactaggatcaaaggaatcatcattagtgcttattttcttgttattagtcataattgtattattattaagattttcgtatgcattatcatctgaaggagcattcatacgctctcttgccatcattctattctgctccctatcccttaatgtaacattctctgagcttcgtctcgctcgaatattattatctatattatcggtacttttcttactacctacactacttctacgatcaatcttactactgttactaattataggactctcacttatcgaattagatatattagaagtggtggttttgtcattgctattgttaaggccattaatttctgtattgtttagggtactatcatataaagacgaactcctgacattttggtttaattcattaacagcctcaacaccagagtaatattcgaaatggtgatccctttgttcactagtatccaacaacttttcaataagtgttttcccaccatgaatcttttttgatacattagatttaatcctaaaaccatctttaccaggtaacaaaggtagcacataaggtacataaagacaatcatcgtataatctaggactaacttcatgtgtacgctttaagaattttgttaataacttaatattaaaaccatctgcaatgttatacgctgttaacctgggcaatttcccatctctatatcgataggattcatggccattcaatagttgtactctagtagaaaaatgattctgtctatccaagatatcaccactgccatgcaaagttaatccattaggtgtaatatcatttctttggagatttgttaagttcgttaactctgcatcttctgggattaaaaccaatttttgagatatcttagaagttcttgaaggtaatgcgtttattgattttctatatttattataatggttttgtgaatatggcacctttttcagtgggaaacgatcccaagaggactgagagccacgttgttctcttctacctgatggaaccagggatgaatccaataagatattatccatcgagatatcactgaatctggatgaccctgaagatcttctcatcttataacgttctctatttttttcaaatgggtttcctcttccccaacttgatcttgtatttgcagtatttactgttaatattgatccaactggaatattggcactctttgacttcaaacggaaatcatattttgaaccattagttctatttccatcattattacttctattgctaattgaagggtattttaacctatccttaatactgcttgtaatcctttgactcacactagcaggtctggatgaactactggaacagcttctactactctgattataactgttactgaccgtcgtatattgtccattattaataccatgttgtgtccttaaactgttagaaataacgtggctaccaacacctatactatttgacacgttactaccatttatatggctaccaatgcctcttttacctttagtaacatttattcctgccgcatgacctgcaaagggggctgttgatcttggtttagaacttcttgcgtctgtaaccagaatcgacggtgttcttttagacattgctgatctggtaggaaccaatccaaccacgtcatcatcttcttcataatcatcgtcatcatcatcaataacgtctgccaaacgtattgtcatgttttctcctgttgaacactatttttttagtttagcttgattatatgcttataatttacactggcttacacttacacttccaatatataactattgtatctgtgtatactgtatgtgtttttttattcacatgtatgtgtgtgttttgttgtatatatagtatatatgtatttaccttaacagtttcttttgtgtatcaaaaatttcgttctaacattaaacataaatattgttatacacgtacgtgtcaattaaacaaagacatataaagaggaatacgtatatatatatatatttgtgtgtgtagatatatatacatctactaatatgcataattccctcccccatatatgctgaccattcaaacattaagtgcaagaacagaatagaagtgggaatcttcactcattactcatcattatcgtcagacacatcaatttcttgctcttgcaaaccttccataccaccattatcagcagccaattctgcaccttgtaataaatcaaacaaatcatccaattcgtctccatgtatcaaatcacttggcttttgaccatggttgtttttgattctaggatccgcaccaacttcaataagatttgatacaataaaagtcccatgttcaggttcctctagcgagtatctgactgccaaatgtaaaggggtatctccattgctcttattcttgttatctatctctatatctgcatctaaatcgagcaatttgtccaagacttcccacgacccatattgacagcaaagatgtaacgctgtgtttcccataggatcatgtgattcattaattaatttagacaatctattctgatcctcattaccgatcgtagcaatcacagtgtcaaacaaatcctcattgtttcttctactagcatccaataattgttcccctaatgaggcaccttcttcatgtgataattgtggttctttctcctcgttcttcattgtaacagacgtattagttatatacagaaattaggaaaatatgtcgtcaacactctatacgtaagtgcagtccaacacttccctctgcttaacaagatttagaacactatatatctgaatcgtatactcttaaacattatgttacctgaaaatgaattaacattagaatacttttgtatggaattctatggggagagaatgaaaaaaaaaacgaaaatttagactctgcgacactttacagattgttctaagagtgaaatgtagagttgagatccatacgtgtatctacatatgaaagggagaagaaggggatatactcaatgattaagtagcatccaatttcacactgcttggttgataatcaccaagaacactaacagcctatctccaccatttttaaacaaagctttctcttaccattatgtcttgtgatatttatcagttaatccaactagcacaatcctctaataatgcggaaagaaataatgcagagagtactttactggaattagctgatttgaatgcttcgtctgtattaacaactttgatgaatgtggctactaacaacgaagacaattctactgttgcagtccaatctacccttacttccagacagtttgctctattaacaataagaaaactgattaccttttattggtccccagcttttgagtcctacagaaacacttcatcgttagatttaggcactaaaacaatgatcagaaattctttattgaagttatgtcttgatccaaaccaagatactaaattatataacggtgcttcttactgtatcgtgcaaattgccgctgtggacttccctgaccagtggcctcaattgttacctgatctatataaatgcataaccaatattgttatggcaaatccacagcctgcattaaacgcaatctccatactaaatgaaatttatgatgatattatatctgaggatatgtattttgatggtggaataggtattgaaactttaaaaatcgtttcacaattagctacagacatgaacccacatactaacaactctactgaatcattatcggtctctgttaagttcaaaattggtgccatgaaactctttaatgcatgcctactacaaatgtctacggttacctcaaattcatctggtgatagaaaacacttcgttaaggacatagtgtcaaaatcactagaaatgttatcccaaatgttatcccaatatggcgacaacttcaataaattgatattccaattaaaatctttgatttatgaaaatttggtcctaataaagtctgatttcccagtaaaattattccctaataagtggatagaaaattttaaagaaagatccattcaagatttatctttattaaagaattggtacgtcaataatcatgaacaattactattagacgacatcttattgcaacaattcaatgaatacgtcatacagattctagaattcttgtctttatgtaatgaaaccattcaattgacagaaactgaccattcagcagtattacaatctatgttgacattatcatgtcttgatgattcaacaagagacacctggttaaatgatccaaatgaatttgtatcgaaggaaaatggattatctgcaaactataccataagagatcaagtggctgattatttaagtaatttatctggtcaaactttacaaacaaccttccaaaatgttgtgcaatatataatgaacaatatgacgaatagtccaaaattactagaatcatctatatatatgttgcaatgtgttctaattaatggtgaaaatagtgaagaaaccgatagtttcagaattaaatcaatcaatgaatttgaagcattcattgatgcactatttatgcatcaataccaattaaatgatgctttacttgcatcgagaattattttagtgatccccaaattattggacaattttatggatatattacctgatgttaaaataatgactaccaattatttgattaaaagtgttgaaagaggtatgaatattatgttgcaggatcaagatagtgataatttaattctttcctctatattaattgcattcacctattatgcctattatgctgaattgtctagtgttcttaactttgagctatgttcacagcttcaattaaatcttttaaaattagtaaatcatctatcacaagatgctgaagaggatactaacggacttttaatcgaggtgttgcataatatcattaattgtaacactgaatctactgatttcaagattattcgtcaagaatttacctcagttctatctatctctagtaaagatccatctaacattcaaattgtagtagaatctcaagagtgtttggagaaattattagctaatattacaaccgaaagatatgtttccttcatggaattatgcttaccatcttttgttcatattattcaaggtaatgctatcacaggattcaaatattccccattactatccttaatattagaatttcttaccgttttcatgaagaaaaaaccaactgatggaccattaccaactaaattctgtgaatatatttgggagcccttagttcaaattttacaagcatcagtagaagatgaagttttacagttgtccacagatgcctttacatatctgattcacaacactgacagagaaatcattaaacctcagttatctacaattgtcaacattttggaaagactattatctatgaatgttagtgacactgccgccatgaatgtaggatctttaatcgttactatttgtaacaaatttaataatgaattatctgatttaattccgcaaattttaaaagctgctgttaacagattaatccatgttaaacatgttgccacacaagaaaatctagtgtcattattatgtttcttgacttacagtgatccgttacaaacattgaatttcctgttccaaatgtcaatggagcaacaacaagaatcattaccacaatcacagtttaatgtggttcaaacagtttttaataaatggtttgaaacttttgaaattatcagaggagaacgtaaaattaaggataatgtaattgcattaagtaaaatcttctttttgtcagatacaaggctaaatgatgtaaccgtcaatggtgaattaatcccctatgatggtgatttaatcattacaagatctatggctaaaaaaatgccggatagatatactcagattagtgtttacaccaaaattgtcaaattgttttgtaatgaattagagtatagaactagaaagaccgatccggaaaagtatattactagcgacatcaaacatatagatgacaggtctgataataatattgatactaacaataatatgaataatgctaataacggaggtgatgatgatgatgatgaatgggaggacgtcgatgatgttctggattatgaaaagttaaaggaatttattgaggatgacgatgatgatgagacttaccatgaaggtattaaactaaatccagaacaagctgaagcccaagaaattactggcattatggatgtcccacaaagccttgtacatttattgatagaattctttaaagaagcaactactagtaatgccaatgaattccaaaatatatacaattctttgaatgatagcgagaaagcagttctaacacaaaacttggtataaccaatgtaaaatgtacacatttatataaatacatgaaagtcgaatgatgtataattattaattattttctaataataaggattaattgtgatttaagtagtgcgaaatcaattatttcaacatgaagatattagataggaaaaagagaaacataatgttctactaataattatataagagaattatagcttgttctaaattgtaattaatatatacaggtgcttctaaaatatacaaatatagacaaaaagagaatgaatacatcagttcaaaatttagcacaacagaataacactaataaagtctaataattaagaaaatatgaagtagtttccatgtcttctatatggggaaccagggaactatcacatactttcataattttgttaaaatgagaagtatcttgttttacctatgataaatttatggtaaattacaacatcagtatgatattttttgtattaaaaataagattatatgttatacagattcctctttgctaatacattaccacagcacattaatgtgttacagaatagggttcatcgatgccgtaggaatcctaatacatttcgtggtcaagttcctgtaaccggaatattaataccttttgaggtttttttttattagtgaaaagaattcttttaaacatttgctagtagatcctgttaaatagttacttaaggtaatcaaaatggttatttttagtcaaaagcgagtagatataatgtgcctatatcaagttcaaagaagagtatatttgaatcgaacttctcaaagaaatagtcaatgagtttgttcaaaagatgattagacaaagatctgaaagtctattattttgctagtctaaaatacaaaaaagttagatgaatttgctcctctccccaaaagtggatttaaagatcaaactaaaaaataaacaaatcaaatcattgatattaatacagacatgctcatatcaaattgttttttgcatcagttctcactggtgaaaagagtaattttgaaaaatgctaacaagtacttctaataagagataattacttatcatatgaacttcgttcattgaggcgttttaatattcaacttcttttcaaagttgtatggatcaggatggggggggagagtcttactatcaaaaactcacaagttgttctctttgccttcaagatcaacacttcaaatggtttagttgaatagatattatatacatgcctaacttctagcacagatgataaacagttatctgttaataatgctgataagtttgcagcagaacctaattatggcgaattaacttctctgtacatctctctcttctatgtttctacccaaaactcatcgttttttgcccaaagaggcaatttctcaaaattcttcaatttactctaatcaaaaaacattttatatcaacaataaactattaaaaaccatacaaaaccattccagtcacccacaactgtataagaatattagcatgaaaatatctatagttaccagtatatggatttaatactagtggtataacactgaagaaatatatatatatatgtatatatataccatactgtactgtactgttaatcttattgggaactgtaagtaaatgaatacaccatctaagactagatttgaaatgactcagactcaaacgaatacagatgattcaatgatacttaccccattcaggggtcgagctatagaagaaaacagactgcgacaagcctttagaatgagtgtgactcccggtttgaaaaggagattacaggctcaaagaagccattcttcttggcgtagtaatcctaatgaattaaggttatttattagtgacatgagtgaaagtagatattcaaacagtgggaaaaatcttatgggacaattacaaatggcatctggtgaagatagcgaacttcaacagattattccatattcggaacatgatctatcgaaatccaacattgaacaacctattgcaacaccaagaaagaacttcgaagatagtagccctacaatatcaagtaaaagtgatttacctacagaaacaaaaggagattcgaataaagaatatggaaatacaacaaataagaatactaagaacccacctaaacgtttatcagacttgatcttttcacagttgaaagtaattccacgagaagtaaagatacgtaaattagaaccattgaaaattcaggatgttggtttaaaacctttgacagatgttgatgacaacaacatcaacaacaacaacaataataatacagggttcatctttaataacgattctcttccggttggactgccacgtactcccccaacagtcaaacctatatatacagatgacaatattttacttccaataagtgatcataacgataataatactgttgataatgctgctgctcctatggatatagacaatgttggaatggagaatttcgaagaagataacggccagaatacgaataactatgataaggatccagacataatcgaccatgaatacgaaagaagctttgcttttggtcaaacaacgccacacactgacaatgaagaagctgaactacttgcatattcagatgcagacaaaagtaatagtcatggtagtattgatatcaagaacaatggtagtgaaaccattgatatggtcactaaaatacggcatttgttgatccgaccagatgggacatttgagacagatttcgataaaataattacatttttaaataataatcagatgataatgaatgactccatgccttcaatgaatgaaatatttgaaatatgttgtcaatacttagatatgagtgaaatcaatgaaattgaaagagtatggtttatttattaggtagcctaacattaacgaggaaagatgaggaaaaggtcatgaatatatacgaatatgtatgaataaatatgaataaatacaatatataaatatatacaagataacaatattatgaacttaaatatccatcccgttgcatagaatggataaaattctccatatattcgtatataccgaatgatataccaccggagagaccgactttgaaaaatcttggtaagaagcccttccatagagcaggtaagccttcatgaataaaaatctgatatgcgcaattaactgaatttgtatatagtttgggtgcccattgactttgcattcttgtcttaacgacatctaaaggttgagttagtgataccacagcaatagaggaaaacgtacctagaatgactcccatgtaggattgcaatgtttcattattcgaaaaccgttgcaaccaaacctgcttcattgcagtgtaagtaccgaatctgaccaccgaattttccatttgtctaaacaatgtaggcatagagccttgaaaatatgatctgagacctctggaacggtacatttctttaatagttttcagcaaaccatgtactggcacaggatctctgaaactgaatctggattggataagaggactcttcactttatgaaaagttgttcttttagtagagacgtttttaatagtagtcttattagtcgtattaacagaatgagaagcaaggataatattttcgatcatattggttttaatgttttcgaatggaataatacagacactttccatcatcccagtgaaaagggaggaaagtaagattctaccatttactggaacttgattttcaggaattgtcttttgcatccagttattcacgacatggaaggaaccaaatcgaataaaagttttactcacagcacatatattcaagatggaacaacctgtgaaatagtgacccaatggcaacatttcttgaggaaacctgtgaggtaactgtgagacagttttccaaaattcaaaaggttgactaacagtagtttgaacaactccagcgatactccctgctattaatggtattaacaatccttgttcactgttcatgtttaaattataaccttgtttccataaaagacttagaaaaaaaaaagacccgtgtaatcaaatttatggtttagacatatatacacacacacacttatacacacacttatacttacccattcactcactcactcactcgtccaacccatttggttctggatagaagactctggacagaatgatctaactagcctgctgtggagatgattgcacaacgcagccaaactttgtcttcttcactcttttcactttcttctgtttgtttaaaagaaaaattatagacccatacaccatttaacaaccctaacaccaaccctaatactagtcctaattttgtacccttttctccccttctttctttttttcggctgaaaacccgaagttgacacattttttttttcttttgtcttttgtcttttgtttttttttgatctaagtaacacaaaaaaaaacgacaaaagaaaaaaaagtaaaaactttttttttttcctcgaacacagaaattgtttgcttttagagtttgactgggagacaattgcattgcaaagttttttttttttttgctgttaaattgtgacataatcgatcgacttctgagtacgcatatggttgatatttattccatgttgtcactgcgaaaacttagaatctttcttttcctttccacaaggaactacttgatatctcttttgttcttctgctgcatatttcttcacacatcccatttcccaccttcatcttcatttgttcctttttatctggtctttcctgcttcctactttcagctcagttaattcatgtttcttcgaggactaacctcaatcataggcccaattcaacgtcgcgctataatgtctgctcaaattccaacaaagttcgaacaactgttcaagaaagttgacgagttgaaaccacaatttattgatgttgtcgctcaagcagtggctatccctgctgtctcctcggacgagaccctaagacctcaagtggtcaagaaggcccattttctagtgcaacaattggaatcccttggcttcaccgatatccaattgaaaccactaggcctacaacctccaccagtcagtaacccaaacttggaattgcctcctgttatcctatctcgttatggcaatgacccacaaaagaaaactgttttggtctacggccactacgatgtccagccagctttcaaagaagatgggtgggactctgaaccatttgaactggttgtcgatgaagaaaaaggtcttttgaaaggtagaggcgccactgacgacacaggtccattaaccggctggttgcacgtcgtcagagctcacaaggaagccggtgtagaattcccagttaatttaatcacctgtttcgaagggatggaggagtctggttctttgggtttggaagaattaatcgccaaggaagccaatggctacttcaaggacgtcgacgctgtctgcatctccgataattattggttaggtactaaaaaacctgtcttaacttacggtctaagaggttgtaactattaccaagtcactattgaaggtccacaagccgatttacattctggtgtttttggtggtatcattgctgaaccaatgatcgacttggtgaaagttatgagtactttagtcgactctgatggtaagatcttgatcaaaggtgtcgacgaaatggtcgctccaatgactgaaaaggaacgtaaattgtatgacaatattgacttctccttagatgaattgaacaaagctagtggctccaacaccgctctttacaccaagaaggaagatatcttgatgcacagatggagatacccatctctatccctgcatggtgtggaaggtgcattctctggacaaggtgccaagactgttatcccagctaaagttatcggtaagttttccatcagaactgttccagatatggactcggccaaattagatgaattagttatcgaacattgtgaaaaagcgtttgctaaactgaactctccaaacaaatgtaaggctgaattgattcatgatggtgcttattggatctctgatcctcataatgctcaattcactgctgcttccaaagccactagattagtttatggtgtcgaaccagacttaactagagaaggtggttctattccaatcaccgtcactttccaagatcaattaaagactagtgtcttattattaccaatgggtagaggtgatgatggtgctcattctattaacgaaaaattggatatcagcaacttcattaacggtattaaattaatggctgcctacctacattactatgctgaatccaaagaaatttaaataatgaacgattatgtatgaatatttatatatattaacgtttctttttatgttactaaatatatttcttattgattaatgatcttaatagtcgtaataataactaaagcttctccaacaaaaaaaaaaaggaacagatacagacacaaatagaaaatgcgccacccatggactttccaagttttcataaaacgtatcaaattgataagactaatctgatatatatgaagccactttttaattctcagtattgatcaatcatatcctgcggaagattcaaaatttctaatttatttatgaaaagaactatcttctctataacacgaatagtcaccacaaaaaaaaaatacaaagtaaaaatatttcaccatggtaagagacaaaatccttattctttgtgataatcgatcttctgtaaatgaaaaattggaaacattatttaaacaaagtttacctgttgaccaaaacataattaaatccattaaatggaaaaataaatactacgatgtggaattcgacctttatatcgatgaattaactacatcattggaggattggatcaaggaatttaacaatgaggagtatgatatattacgagatgtattggcaggaatcatatttatcttaccattcgatgataaggatacattagaatttatagattcagaattgaataagaacactaattgtgatgacaataattttgatgataaggaagacgaaggtttctttatggtatgttgtgatccaatatccaatgaaaaggtaccatactggaatgattttacaaaacttgaagttactacactaaccgtttcacaagaaagaaataatgacggtgaatatgaaggaattaaaaggatagaagagattattgatgtatatccatggagtcattcacaatcaagacaacaagcattgattagtgaaacatcacaacatttagatttaaaagatactattgatatgcaaggcattatatcaaaattaaaattagctaaattggaatattcaaaaaataaagatgagtcgatggcattggaaatctctgaagagatgtctaaattaatatcagatgcaatataacatgtacatacatacataaatatatgtaaagagagaaagagaggtaaagagataaaaatttttgataaaagaatacattttatcaagaataaccaatcataacaaaatctaactttctaccattgtcttttccaacaagttaaaacgatgggaataaatagaactaaaattactttattaatcaattgtagccatagtaaatcgttgaaatctgaatattgaacattcaatagcaacatgttaaattcacttgtgtacataataggtaataataggtgagaatatatttgagatatgatgctttttctatttgagacagtcatcactacgtcaggattataattattactggtattatctctattaatattcctgggacgttcttttttaaataggtttgaacaatgtacatagcattgtgacaaagccaaagacatgataaataaggaataacttacatttcttaacactaatgcatattcataattgtctttataatgtaatgttacaataatattaatgaaattcaggtcctttaacattgtcctagaaaagatagcttttctccaagatctaaacttaaataaccaaatcagttcccctactgtggaatagatcattagctttattaaaaacatgtgtatccctccaggaagaaattttccacctattaatgggtaaaggattaaccaacgtgtaaataaagcaccatacaaaaatgcattggtgattctataatattggtacaatttatgtacaaactttacaggtagcattgctgtgagattgtgataagtcttaatggaatataaaaattacaactgtaacttttttcccctctctttgtttcgaattgaactcctcttcctgatacaaaggtatatctaaacacataacggatacgtttgatatgtatataatacctgtgctggcttcgtatgaatgtaaaagtatgtgaatgaagtttcacttgaagatggaaaaatccactcatctgcaaaatgtaaaaaaaaaaaattaaagaataaaactgcattaaaaatgtattccaattttatttatcaagaagattacatagtagattctgatggtataacaataaaaattagttgtcattagaggtgtgtaaattgttatccttaacatatacgctaaataacaagataaattgtgaatttatcaaggataataatttgatatgaattctttattctatttggttgtgtcgttccttttagtgacctttgtttggtgtttcagtcctcaggaggttgaagtcttccaattacaacatgatctggttgagaaatatggacccaatatgaacttttacaaatttttgaaattaaagaagggtaaagattcaacatctaaggaaattatcaagcatctaaggaaattggccaaaaaatatcatcctgataagaataaaaaatataaaaagttatatgaaaggttaaatctagctaccaatatcttaagtaacgatgaaagaaaaaaaatgtatgattattacttgaagaatggttttccagattatgattttaataaaggtgggtatttttttaacagagtacaaccaaagacgtatgtgattttgttatttgtttacttggctgttagtgtgattcactatggggtattaagattacaatatacatcaagtagaaaaagaatagaagattttattagtcagtgtaaggaactggatgacacagattcgctaggtgaaaaaagattgacatttcaacagcatccagaagataaacccaaagagttattaattaaatttggggacgtttatttgttagagccaaacccaagagatgattcgaatccaattaggacaatcatatctcctgatactttagaagaacctactgtaatggattgtttttttttcacgctacctctgtggtttttcagtaaattgacaagaaagaatcatgatcagattaaagacaaatctatgaataaaaaaaacaatggatcgcaacgtagtaagactaagaataaaggtaagaaccaatgataatacagagaattgaaaaaaaaaataaagaaaaaattgagacatttatatatcataataattacatgagttattcttatatcattagtagatatatgtatatacgtatataccttatttatatgtatatatgtgaatatgacattatatttattataataattctttaatgaatgtctacatatagtcatatattaatgcatagatggaatgaggggtattgcagaatgaaaagaacagagtaagatgaatataaaaacaaaattccggaaaatcataaatgtatattaataaaggacagttgaataaatgtggtttagagttactgctatctagaacatgtcattgcatgtgatatatcacatagctataataatgtgcacttgcttgctccatcttatgcagaggaattttcaggtggtcccaaaattatcaccccattctctttatttcgtttatctatctcctcttgtgctctggatgcgatcatttctcttaacttctcatgcaaatcagattcagtagtcaactgctcttccaaaagttccacattaactaaaccagaaccgtttattgtcgtcccgttttcattagttgtataatcatcaggatttgaatctaaatccatagaagaattttgataatatgttccatttgacacagtcccatcaataaacgtttgtgacgctgaagttgtggtatctggaaattgtgggataatattcccattcccatcatccacataagtgccaccaccaaggatttttgcatacattaatcttgtatcattcaatacctgttctgaatagaatttccaatcttcttcttgtaaaatattgaagatatcaggtgagatcaattcgactttatacagtttggaaaattttacaatctcttcagcaattaaaacaacatgacccatataacccagattcattttattattttcatagaatctgtatgaatttcgatatcctttcaaaataaaatcatttgttatttggaatgaaactggttccttgcccttggtgctattaaaaaatttcatattgtttggctccagtatatattgatatgattttaatgtgtcaaatagtgaatacacaagaaatgaattgtatgaaaagtccattctaccattaaaaatctgttgaataatatcaaaaacaacgttatgccaaaaattattccaagggtattctaaaaatagatttaaaagaattggtaatatttggttatcaactaaggtaattttaaacacatcaccaatagtaggtcgtgttcttagttttaaattttgattttcattcacatatggaatctcaaatgattcgtctacttcatcatcttcctcatcatctgaaaagaaagaatagttcattaaagttttctcatcattaaaactattcaaacttttattgccagttgatgtttcaagaaatttgatattgtttttcatattatttctctctctatcatcatcattattgtgatttgtattattaatgtctataacatttccattagtaatatcattagtcattattttattattagtgttagtattgttataattttcattagtattttcattagtattattatttataatattataattttttttatcattagaagtgctgtcattattttcattaatttggtaagatttattcttggtatcactatcagtcccaacctcgtcgtacaatttcaaactgctcatagattctgatattgatatagagtctttaattctaatgtcatcacgcttacgagctatccgtggtgccctctttgaattcatcaatcccatatttgaacaatgtaataattcagcaatcaattccacgattttaaatctttcaaaccctaaggggatgaacgattcatttaattgatttaatctttcgatatcacttggtttatcgaacttaactattatttcaaccaatctgtctaaattttgagtaaatttaaacaaaagataacccaaataaatcggatctctatcatttggataattatcctttagattcatggttagaagattaattggatcatagtctgaattattttttcgtatcaattcaataacgacagatactgttatatttagtgcaaatccaccttgagttaaaataatgtcaatcattttgtctatacagtcatgagaagctaattttctagtcagttcgtttggaccaactgagatatcatcaactggagcattggcggagattgatataagtgcttttaaaaagtcccctacacaattttgaatatcatttggatacttatcgttatctagaaaattcaaacatttgttaattagatcttggcttgatataaacttgataataccatttgaattatctgctttatctgtcccaataatttttaagaaaagatcgattaatggggttatattaatatgagataatattagatccacgatattatcttgttttaagataaaatttaaaaatggtttctgtttggtgaataataaattttcaattacttttaaaaaaattgacacaattggggaattttcattcaagaaagatggatcgtgtattagagaccacaactgattcaaatatgtttcatttttgactaattcatccatgatgatccatatgtcaagagataggatatctgcaataatattagctttatttattttttcattaattaaattattaggttttaaatgatcattatctgtgtcattagtgttattgttatcgtcattattatcttggtttgtcggagttgatattaaagatataagctcatctattaagtattgcaaatgaggtattttgacttttttattatcaaaaaaatacccaaaacaaataaaatctaataaagtattattttgtctatttaattcgtgtagaaggtcgggttggtttaaaattcgttcgataaaggaactatctagattattaattaggtcaggactgttctggtattcgtagttggcctcagtatcattattcttggtaattttatcattattattattgttactgtcattatcattatttttcagtttatttaatatatcgaaataattagtcaatatcgaatttatatcggaatcagaagaataggtagaggtttgtccaaagggccaagcagacattatgggatatgaggaacagaggatatgtgcttgtgatatggaataatagaaagaaaaaaaaatacgattcacttaacgttttactaattccttattggaattaacaaaaatacacagaatcaatagaaaagaaattctcaaaactcctcagaatatatcttgtaaatcaatctggatcttaataagcaaataaatagatgatgtgtattctgttccaatcaactgaatcagtctgtatttctgacaaaaagaaaacaaagcaaagagagaatattgtgtaaggaaagctttttgtgaatacactgcctagaaaaacgggaatgatattaataatcagttgcaattgacgaagtttaatgaaatgtttctttgaagtaccaaaaataatactctgtcaagtaatattatgcaataggagaatttactacattactaaatttagagatctaacatctctaaatttattttgtttagtttgttttttttgttttgttttttctttccctttgtatggcatcattctatacgaaatagtgacgtgagggtaacattttcaaaaatttttgtgtcatataatgaaaagaaaaaaaacaacgacgtcaaggaacaacgatctttggtgtgacataaaaaagagtagaataataaatatattgatacatatgtatatatattgatttgtttatttgtttatttgttaagtaccagtgtactaccactcgatatttggcaggatggtaattcaacattcaataactttttatttctttctactgcttcttcctgaatatataaatctaatatttcatttaaatatccatatgcgtagttataactctggttattaccacctattgttttggtatttgtttcttgaaagatagtatgattaaaataagaatatggagaaatagtagttttgtcgtcctcccatatagtattttctaactgaattgaaaaattatcaaatggatcagttgccaattttgaagtcaaacatatttcattatatatgttttctgtttctctcaataaattattaacagtgtgccaaaatttatttggttctgtcttaatcagattttctttttcttgttgtggtttatccttattcaaataaatagaggacgtttgaaatgaaaacctattcgaatcctgattatttttattattatttatacaaaaatccgcttgtgatctgtttgaatacgatattatttccactatgccattattagttgaataaccaaattgtcttctattacattcttggatatctttaatggtaataactggagttttcttaggaaaagttgaacttgaaaaaataatattttcttcttctttattctttttcttcttccttttactagtaatattaaagattgggtgtgaggatattttttgtttaaactttacgaagaaatctaccatattcttttatataatacagtagattgatcaatcttttcttttttttggaaatttcattcatttattccctttcttattttttttatctttttggaaagttatcaaacataatatatacatacatatatatatatattatgtttgatatattatgtgtatagttattttaatatcaactttccccttgcattgaagagagaacgaaggaagcaaacaagaaaaatacatgtgaaaataaatgtatatttacatgacaatactaacttacttttatactttttccaatatattattgctctaatattgatgagagttaacaaatttgtattctatgttactaagattattaataatagcaaaaataaaataaaataaaaaagttaagaatgtagtgtatattgaaaaggttatttaaatagcaaaaaaggtgaaagaaagaaaccagagagagtaaaattaacatgataactcaaaaaatatatgccattaacttataatcttggtttttggtctctgagaacatattaaaaaaaaaagatatttctctacgcaaaacatgaattttctcaaaaaaaaaaaaaataacatcatgaagagataataaaccaaaaaaaaatatgtgataaaattcttcaaaccaatagtgtgaatatatcactaaagtatatctttaaacataaataatactagatgaacaaaaaggtgctttctcccctctctcccttcttctgccccttatgataatttccaatcctatttatggtatcattaaatccatttaatactaatctttcgacaaaaaacaatttaaacacacacacaaacacacacacacacacatatatatatatatatacaactctatgtatacgtaaatattttcataactgttcctgttgggaatgagcgcctttattcattggatatatagtaaacattctcaatattatattaaacagatttagtatacaaaattataataaagttcttcactttctttctttatatacaacatagaaataataatatagaaagattgtaaataagataaaaataatgtatgatgaaattcttggctttatatatgttaacattcagccattttcctctacgaacagtaagatatttaataaataaactcaacaacttttggtgacctctcaacaattattactcaacaatttatcgtttagtgtctgctaaaatcttattgttctatctattttatcataaaacattctatttcaacagttccatatatcaatatatatatatcgagaaagaaaatgtataaagacattacagcacaactacttgcattaaatgtaacagacatttctcaatgcttaaaggggatactagggctgcatgtcttatttgggaaattttttgttaaaagattagggtttgttaaaaaaaacataaaaaagaaacaaaaaaaatgcggttcctcaactttgtctactatttctaaaaaagaagagttgcaatttactttttaacctcgagaagatccagattgagatctcaatcacaagactacatataaaaataccaagccaaaccataccaatccatgaagtaaatggattgtacttattgcaaaagagaagaacgaaaaaaaaaagagagaaagagaaaaattgtgtgtgtgtatgtgagaaaaagaaatatttatcaaaattgataggaaaacattcagtaaaggtttgatcatggcacgcacttggattagaataatttcaatactgagtggcctattaatatttctggtaattttagtaccaaatatatctggatttcaatacactatcaatagtatattgtctggtgattcaatttcaaaaaagacaaattcatatgatgaactatctgtatcagttatgcaaaatattgaatcatggattgatacaaacgataatgaatgtaatggctgtggaactttcgatgaaataaaagaaatagatggtcaaaaaaatcaaaacatcaatctggatacgttaacagatgcattaaattatgagctaaatatgtggatcaaaattattgaaaataaattaaactctgtaataccaagtttaacaaacgatataaataaagaaatttcgaaattgatccatttacaaaatgatacagtctggttgccattattaaaagaatgggaaattaaacaaaatatagaagaagtatcagtcaaaagctatattgacgacattcaatgtgatggtgaatggaatccacacagtgaaatgatgatatactataataaggatactggtaagcgaatctcacaatatgtaacgagaccattaattaattcaatgataagtaaatcattaaacaatttaactgagttttataatagattaagttcaacacttaacgaagtttttataacagaatatgaagccacaataaatcaatcaattaatttgcatgtgtcaatgtttgaggaatggggggaaagtgtgtttacagaatggtcacaaagaatggcaaataatgattttttatgggacgaaaagactattccaatttcaatttgggaaaaatatttaactatcaaaaaaaatacaataaataaatataacgaattaaaaaaatttcaaccaatatcaagtgaatggcatcgatttttggataactgccaaactcaattaaatgtcacttttgacaaatataatcaaaatttaaataaactaatggatttcgccgccaaagaattcgaaataagagattcaattgaaaaaccatgatcagttgtcattccctacatctttttattatatttggacaagcaaggaatatatacatataattttacaattttgtgtgtattaatagattaataatgatagcagcatgggtaatgattcattagcatactttgtattttcgtactaggattcatttatttagtatacattgcccttttagtggtttatttaattgatctcgataagagatgatgctgtttcttgattaggacgtactatcttttttggtccatactactattttagggataaacacccatacaccttccatatttatcacttttttcatgtttttatgttttgttttgtttgtttgttaaagccgtcgtttaattcttttgtttctttttcaattttttttattgctttttcctcttttatcttagcaaaaggtgccgtggcaagcgatgcttttcggtggtcgttctggggccttaccctatcggatttttaaaaagtttctgttatttcttttatgtgtatttttgaaccctactagttttcaaggtctttcgcttgcaaaagtctcttgtatattcacctttttttttttccttatgaattagtattacttcacaaacattaaacttaaactttagatttgcacagaagcaataccttctaataagtaaataaacaaaaagagggattcgctaccaataacattttataaagatagagggaaaggaaagatatttattaagtatcatatatatatactataaaagacttttgttgagaatgagtgcctgtattcattggatatatagtaaacattctcaatattatattaaacagatttagtatacaaaattataataaagttcttcattttctttctctatatacaacatagaaataataatatacaaagattgtaaataagataaaaatcatgtacgatgaaatccgtggctttatatacgctaacattcaaccattttcctctacgaacagtaagatatttaataaacaaactcaacaacttttggtgacctctcaacaattattactcaacaatttatcgtttagtgtctgctaaaatcttattgttccatctatttcattatagaacattctatttcaacaacttttgactatttgcttatatcatcaaatcttgataattcttgaagttatcataacctgtatacttcatttaaattcattttccatgccatggatataattattaaaattttagttttttttctctgaaccctaagaaaaaaactaaaattttaaaaaaaaacaaaaagaaaactatttttaaaccccatctatccttttttgatctgctttgttttattatttttttttgttggaaacagacacccatacattcaaccaccacaattttccagaatatcccttggacctttttatggcgttgaaactgctggcgctagaatttcggaactaaagtttcttttttttgctttttttcggattacgaaattttcaattctcgagaacgaagaaattttccagagatgttggagagtggaaaaaaaaattcaaagtagtcagagattagatacgtaaaggtatataaatatacatatgtgtcatatatacaaatgcctattttgacattttcttctaagtacaggccatttgccattaatcaactatatagaagttttcccctattcatcattatttttttattctattttttttccttgttctaggtaacatccaagtaacgaagactaaaagttggaaggaaacaaaaaaaaaataaaattatttaactgtctttctacttctttgccctcttctgattgaattaaataacatccacttttttttttttaatatgtctgctccagctcaaaactacaaggttgctgatatttcccttgctgcctttggtagaaaggaaatcgaattggctgaacatgaaatgccaggtttaatggctattagaaaggcttacgctgctgaacaacctttaaagggtgcccgtatcgccggttgtttacacatgactatccaaactgctgtcttaatcgaaactttagtcgctttaggtgccgaagttacctggtcctcttgtaacatttactccactcaagaccatgctgctgctgctattgctgctgctggtatcccagtcttcgcttggaagggtgaaacagaagaagaatacctatggtgtattgaacaacaactatatgccttcaaagatggtgctaaattgaatctaatcttggatgatggtggtgatttgacctctttggtacacgaaaaacatccagaaatgttagaaggctgttacggtctttctgaagaaactaccactggtgttcaccacttatacaagatggtcagagaagccactttgaaggtcccagccatcaacgtcaatgattctgtcaccaagtccaagtttgacaatctatatggttgtagggaatctttaatcgatggtatcaaaagagccactgatgtcatgttggctggtaaagtctctgttgttgctggttacggtgatgtcggtaaaggttgtgcggctgctttaagaggtatgggttctcgtgtccttatcacagaaatcgatccaatcaacgctttacaagctgctatggaaggttaccaagtcgttaccatggaagaagcttgtaaaattggtcaagtctacgttactactactggttgcagagatatcatcaaaggcgaacatttcttacaaatgccagaagatgctattgtttgtaacattggtcactttgacatcgaaatcgatgtcgcctggttaaaggctaacgctaaggaatgtgtcaacattaagccacaagtcgatcgttacctattagagtctggcagacatgtcatcctattagccaacggtagattagtcaacttaggctgtgctaccggtcatgcctcctttgtcatgtcttgttctttctctaaccaagtgttggctcagatcgctcttttcaaggctaaggatgaggctttcagaaacaaacacgtcgaattccaaaagactggtcctttcgaagttggtgttcatgtcttaccaaagattttagacgaagccgtcgctaaattccacttaggtaacttaggtgtccacttaaccgaattaactgacgttcaatctgaatacttaggtattccaaaacaaggtccatacaaagctgaccactacagatactaaataaaaaagtcaaatgtatgaatagtgtttaatattcaattatatgaataaagtatctttttttttttttatcaaaagtaacaaaaaaagaacaaaaacattatcatatttttgttattaatattttttaatgagaattccactcaactgtaatttctctaaatcatattcatgcgtgttccatatttcaaatcttttaaagataactgtacttatacatatttttatatacatatatacagacttagtcatctatcccgcaaacatttttaatatatatcttcaacagtataaaaaggaaaaaaaaaaatattttaaataacaaatttatgtgcatataacaatatgtacgtatacatacatacatacatacatataatattctatatctctctaaggtaatgtgttggacaagcataaccctctggatttctatttaaatataattgatgatactcttcagcatcataataattcataatattttgtacttcagtcaatattttgttatcccacttaaattgccactcttcctttaatttcaagacttgatcacgatcttctggtgaatgtgtatatatcccagaacgatattgggtccctacatccggaccttgtgcatttaatgttgttggatcatggattctgaaaaacaagtcaattatctccttcaaacttaaaatggttggattatacgatatttgcaacacttctgcaaaattggtatcacctttacagaccctcttatacgaaactgcatcttgtttatcctttgtagtctcatcaccatttgcaaaacctaccttacagtccactattttatcaccaaggtacttcctgtacatatgttcagtaccccagaagcaccctgcggccagagtaattaacttgtcagtctctggattgaatttaatagtcttcgaaaccctgctcattttagcttaaaaaatcaaacaaacaaataaataaactgttttacctctattaaaactgtgtgtttgttaaatagaggaatacttcaataacaatgtaaataatgaatgagatttgaatttacacaacagagttgtaaagttcacagaaattatgactttctctttagccactctcctctatcaacattgtgtattatggtaatttctgcataatattattcgattcctagttcttaatattttttttcttttcttttttttttttccttttttcttgtgatgactctttttgaacaattgcctgactccagagacgatgagccgaatgacagaaaaaatagagaaacagataagatacctacagccaactctaatggttaatatttatatatccacgaattagggtgacagttatggattaaattatagtgataccgttgatatggttgacgtgtctgaggaattaccaggatcttccaactcttggagaaactcattcgcctcatcagttattcggtctaacaatgaattagaacgattgataggttgattcccaaaagggtgtgacaacgataacattggtgctggcttatctaagtgaacatatgtacatacattttctgtagccaacggtgacacatttatagctacatgcatcggatccccattggaagagtctgatcctattctacttctagttctatattgatccttttcactaaatgatgtttgtttaacagtcgtatctttcaatgaaaacggcggttttaattttgttaattcagtacggtgtttctttttaggagaatgctgatttaaaaaatctgtgttattattgttataactaatcccgctttctggcggtaataaagtagttcttgtgtttaatcgtagttgacatgttgctgctggtttttcttccaatattatcaatgaactgtcttgctcatcttcctcgccagagcccccaggaattgagttatcttcatcttctgaagaatgtataaacaacctctttttcatactatttaatacagtattatctgccatattatttcttggagatccataagactcagaccgtatctgtttcaaacttggtgtatttttgtctataggatatgcatgcttattgaaaaacaaatctaaagtatttttttgcttataatttgcaaacctttttttggaggacctttgaacacttttcaacctcttttccctttcctcctgtttaagtctttcaaattctctctttctatattctttaaccaaaatatgtgtttgaggtatactgtcttgaggtatccaaactccatgcttatatttttgaatatcaacttgtcttcttgtcgggcttctcctcacattcccactcaaaggtcgagatgaatctggttcatcatatttaacttttggtaaaaatgaattatatctaactttccaatatttaatatcatgactctcattaacaccaatattattaccatcgtttatgttaaccgtttttgcttcggtaattttacacatcttattacaatcaggttcgtataaaacatattttattaaaaacatttcatgcattgtatcatgaaaccatttatcaaaattgctaacttgtgggagtctaagttcttgtaaaaacgaataaagtttatcgaatggtaattgtttatagcaggttgaaccttctacattcaaatatgcatttttatccaaatacttatcaatatcaatgtcttcctcccttaaagggttaagataatgcttgactattgaaatgggtggccaattctcaaaattctccttttcattaccgaacaaaaccgaataattcttaccgaacaactcactagaatgctgtttgcagtatctaaataattctttttgaaaattatcatatttatactgaatatcccatgtattgttatcatggttggcattgaatatattataaaatttacttgcaaaattaggattctttaatgaagccaattggtaacttttctctttacctaaacctttaactcctttgatatggtaatctgcacctaacaaaatactaaacaacaataaaccttctctattcaacaattttatggaattatcttctaacaaactatcataattcaatactgtaacaaaattctctttagtatttccactaaatcgagacaaagtatcattggtgctccgtcttggtgatgaagctgcaggagcaacaccgatatccaataaatatttagaataatttttcataatattattaccaccaaaaaggagacagtcagaatcattactccaaatcaaatcaacttttccttgggtctctaatatacaacattgaacctcgccttcccctctagcttgaatcatcgatatttttagaaagctaaataacttatggagaagtgtcatgaatctaggatagcattgatatggtttatttttataatgtgttttcccattcttttctttcggtttctctaacccatcaaaaaccataataaaggatacatttaattgaattaattccttcaaccgttttaataaatttagtattggtttacctgggtattcaaattgaaaaaatccacactcaaacagaatatggtaggcatcaatggcaataacaggttttcttttaagtaaaaatgatttcaacggaaccctttgataagatacactatctgacacttggccactatgacagtctctattactacgtattatatcccatatttgagagacacccatgacatcctttatgaatagtattctttgtatttccctatgttaacagcattattcctttgcttctcttataattgaaaataattttcagcatgaattcttttcaaatgctaaaacttcaatgagaataaatcttataaaaacagagcattaatatcaacatatgcacataccatttctataaatatataatattatataaatatatatattaacataaacaaatatatacatattttaaataccaaacttcaaccattctagttcatcttctactttctcctgcatggttttagttactttggaagtttccaattcttgttcttcctgtctcaattgagacgagtcctggtacaacgttgaatataccgttgattgataattcgaaattaattgttgttgctgtagtgatccatgtcgttggaactgtactgattcagagtaactatttgtcataccattactattagtgctgagattatgatttaatgtcgatgtcatctgactaataccagatttatttctaatagcagaaggatttagatttgatagtgtcattgatactgatttatctatatgctgcaaatcagatgattgaggaataggttgagtagagatagatattctattctgctgtaattgttgcgataataaggaagtatgtgataatgagttggaattttgttgtggctctttgttggtatcaattgtttcaaagcttttttgctggttattacttggcgaatctaatttattactacttacaactcttgttattttattcgaatatgaattccaactagttgaaatattaggtgatgttacacggtgatttccattagcacttgattgctgttgctgtatattctgtagattatgtaaagaattggctacaaaggaggaggaatgtgatgcatttcttgaatttcttccacgcaatatattaattccattattggttgtatttccattaattgtaacaacagatgatgatgtatatctacctgctgacgtagaaaatgtacttgcttgtaaaggtgaagctccctgattcatactactattactgttgataggaaaaccattaattaaagtattattgttgttacctgggtaatgagctacgtatcttggagatgaagaggaacttgtacttgcgcttaaagaaccatatgaatgaggcatgatattaaaaggaacattatttgtcgagaaaactggtggtttaggcaatataggtaccatagatcttgaagaggatgatctgcttgatgtatttgaagaggtgctgcttcttctattacctgcaattccatttgaattcattgtatttatgtgagatatttctatagaattacctttattactattgatactatcttttatagaatttgccatttttgttgttgtggttgtaggagtcatagctgtggtagctgtagttgtcaataaggaatgatctgatatggaaaaagtcttgttccttatggttgaatttgttgtggtagttgctgtcattgctgtggttgctgttggttgaacaattgattttggtacgatatttttagatatagaactattactcaaatttgttaataatgtttcattatttcttctattgccattatttagcttaaccttaccattaccattatgcttattgttactattactattactattattattatctaagaccaattcttgattctttttcattctttttttgctatttctttttttaatgacatcagttttcaaagataatggtctcattgtcccatgtaatttttggaaaagaccacatgcattacaaagagtgtttccatttgtatctcttctccataatggagttttaaaagtcttgcaattataacattgaataggtggttttttaacacctacagatccaacatttgaacttgttgataattctgatatagaagaatttctctttacattcaaacttgacaaggatgtagaagataattgtcttgcaaaagattgagattttcgtattgaatttgtcgtattattgacagtcaacggtatggatattggtttattagtaattgtatcacttttatctttatctttattatcactgaaagagttaaaagtgctattattattattattaaatgcaggagaataatttgaaacaatatgtagaatattattattatgttgacttggagaattttgatacaaaaagttcatgagattttgattagaataagaagaaccgtgtaaaactttattagtaatggtactattataattattgttactatgaaaacgagatgcaaatggaattgaacgattaggttcagaactaaaactgtttggtgcactaattgtggcagaatcgcttgaattacttggagtcatttggaaattctcagttgtaaaatcccagagttgtggaatctcaccattttgtaaattattagaattagaagtaatatctataggttgggtagtagtaatgttattaaatacaccaaactcagtggttgatttagactgtgtaataacattgttaacaccttctgatgtacgaatattaccatttaaattgttctgcgaagaattagaactattagtatagagtccatcatggaagaatgtatcaaatgttatatcatctggcaaagcttctaacatcgagtcaaaaccaccataccctggattaccatttttattgcctatttcttccactgttggcttgatattcatatttccattttcaatctgtgaaaacatatcaaatgtgttagagttattagtatttgtctcgcaattaccattgctattattattattgttatcgttgttctgtatttgaaacaaatcatatgagtgttcttgcttactgagatcttccatggcattaaaaaaacgtatcaaaattgtgtactgttataaatagcaagtacagttcaattttcctagataaaagacaaaaccttattatccttacaatctttaaacagtcaatcagtcagtcaacgaatgaaattaatagttattgaattattattattattattattattattattattattattttattccttacaacctgcttgattacttgtttattctttttccagtctattcaggcataaagtagaagtaatgtactataaagatataataaacagaaccaaagcatctgcaaacatcctaaaacaatccttcaaacatcgaaaagaacagtagttagtcattccttcaattcaccgattgactcttccttctgtttcttattttttattttttctttaccaacatttttttttttactggaaagttttgacatcggcatttacaaactcactcttcagcgatgacccaatctgctatcattttgacatatattcattgaaatatatattaaaaggtaagtgatcgtgagtgatggatgggctggtgagttgtttacgtctcctatatggcactctatctggattaacagaattagagtagtgaacgtatcgttgaaggtttttagaaatggatattgtgggtgattctcagagcagtgaagaagaattggctgatctagatgtcttccaattgaaaaacagtacttatgattaccaaaatgatctaagttttactagcagcagtagtattagtgatagtgataatgctactattggtgacaatggtactgataaagatgaaaatgacaatacttctttgaaacctgctgttgaccaaatattaaaacgtgttagaaaatctagtaataaaatagcattgagaagaaacaataaatactccagaaagaatcatggaaacatgaactacggaatgaaagataaagatcatattactcttagtcagtttaatttaggtgactcctttgattttaaggtcactgaaaagttggatcagttgaacaaacttagtgatatgatcaatactaataacaataataataaatataagaatgatcataaaccggtctttgatgtccatggttcaaaagaatcaataagtcaattgaagaaacaatacaaattgaaattatccaaaaacaatattaatttggaccctgatactattgatatgatttgttatgataaaactggcaaatataaagactggtattttattacaaataatagtcaagatcaattagttacaagcgacttggaaaactttcttttgtgtattggtgtcgataaagacatgttatctggagatttctatattgatgatagtttattcaatgaattagatccatattgtattatcttcgaacccggctacatcttacaagaattttctaatttaataaatcatatgaatgatacgaataagatagtcaatgataatattttcaaatggtggctatatttgatattggataagactatttataacagtgtacaatgtaatatcttttggtgtacttccattttaaatatttttatcaaaaaatatgggtctatcgacaaactaattcaattatattggaaatatattcgatcaaatagcaacagatattatttattatatcgattgacacaattattaccaatattgaaaaaatattttattgatgatctttttaaaagtgatccaaaacttttaatcaaccaattcgacatattatatgattcccacaattttaaagatttattatattttattttgtttatacatggttccaagatgtatccaattgaaagtgatacttcaataactaataatgatattgaaggggatgatttgatagagactacctcaaatgtaaatagtaaagcatcaaacaatattgtaaaaaatgatcaatattccccacaatcaatcatccagtatttcaaagactgtatcattgattgctcatctgaccaacaatgtgctagagaaattctaatcatattaggtatcttgaaattatttgcatttcaataatatatattcatttattcatacgtacatacatatttatccatggaaaactaatatttttgcatctatatttcatcaaaaacaacgttcttttttgatctcatttatatatattatatatatatagatagatagatagaaaaactgaaatattttgaaaagttccacacaatatccatttcctttaatcataaatattaatccaagacatacacctgttatcgtgacaatttttacagaatcacagaaattgatctaaaaaggcttcatcctcctttaaatcgtctggtacaaatgattctgagatacccaactgaaatgaggcagggtttccattattatctttgttgttacacggattcacatctttaagagtgttcttaatattagtagtgctttctttaattgttgaattaacctgtaaatcctcattcttatttcccttgattatcttattcaaggagtctacatccatctgcataatatctttccttttgacggttctagattcagaataaagactcaaagatgccatggtctcttccagactatctttatccgtcccttctataatcttcttttccgagagcagtttccgcttaattattttatttgcatactttgagatcacttgtaattgttcatcttgatcaggtggcacatatagaatatcaccactataacgatcctcatttgatggtaaaggttcattttcaacctcagtatctgttgtattttgttctttatttaattgacgatacttgacatcacttttagtagcatgccgatgtttcaatttctgtttatcataaaacttttttctattatccttcttcaaattataagtatccatctttttagaactcctgctctagatatgtagatacttctgactggaacttatattgtttcatcccacacatctctttttcttctttctcttgtgttttcaatcttttccttttatatttcactctctatatacatacacatatagatataaataaatacatattaacaaagatgcaagattttaaacattaaagccggtcattaatttatacatacacacacacatatatatatatgtaggtaggtagaaaaggtgttcatcattcagaaatctatataatcatcaaaataatataacataatcatcaatcattttcatattccaattgaaaacatgattttttcacatttgtataagatgccgatctagacaagctgtattgattattattattactcttgatattattattattattgctattattttttgttgatgatgttgcaaaaggagtatctagatttgaaatatcgttggtatgtgagttctgtctagaaagcgatacagatgatctaggagtagtagtgaaactagatagtgactcaggcgactcacaaaacattccattcatcaacgatcccttcggtggttgtgggtccaagaagaaagtagagtttgtggcgttacctcttgtcaaatggtcaccagatgaagacgaacttatcgctaaattacttggcacacttgatccaggctttaatcctagagatgtggtggacagtgttcttctcaatatgctatttgatttggaatcagagtttggatctgcggtttcatgattagtattgttgctattatgatggattaatggggtaaagggtgtcaatggggtcaatccagttggataatagtggttatgtatatgttgaggttgagaggattctaaattagtagacacagttgattccgaagttacatttgaatttaaatttaaatttgaacttgagtcggaacctattgtccattgaccaggttttgacattaaaagagaagatccagtggtggtactgttattattagaagtacgatttatgtgattaaataaggacaaaccttgtattctctcaggtggccttttcaaattagataaagaagtcagagatttatttttctttagaaacggtaatctagcaactgaggcagaattagtcaactgattaacatcctgttgaagaattccagaagatgaaacagaaattggtgcttgcgcaaagaaatccttgataaaaggatgtgatttcagagtccttgctgatcttcgccgtttactatcttttatgaaacaacattggatgaaattccagaagtctttatactctggatcactagctagagtgtcgtctatatagtaatcacaattagaaatacattgtaaagtctcttcatctgtttcacaatcaaagggagtgtaccctgtggccatgaaatacaccagaacacctagagcccatatatctattttagaatcgtatggctcaatggcttgaatctcttgtaatgttagtaaactgatccctttgcatcgtacgacctcgggggaaatataagatatagtaccaacatattcttttagatccatatcggacaaattattattctgcatatctaatgccaaaccaaaatcacctagtatcaggtcatgtgcagataaatcatagtcatttttattatcgttcatagaattagtagaaagggaagaagaagatgatgatgaaaaatcacggttggaatgtagagctgatttatgtaatcgaaataagacattttctgctttgatatctctatgaataacaccttgagaatgtaaaaaatccaacacagatataagacatgcggtgtacggcatcacctgttttgaaagatccaaatggccactggtgattatcttttcataaaggtcatcttttttacataactgcgtgattaaaacaatattagcagtagtctcgaaataatcaaagagttgtaaaatatgatgatgaccttggaaagtatcaacaatataaacattattattattattattattattattgttgttgttgtcgttagtattattttgaagttctggatgctctaagaatctaatttgatgagataaatatttgagaagagagaattctcttctaattagttgtagtttatctttaataatatccttcctaatcaatttcattgcataaaactcctttgtatgaatattcatacactgtttcactgtggaaaaatggccatcgcctaaaggattccccttggttatatatttgcatttaaaatcttcattatcctgaattttgtcagttaaaggagattgtgtaaatttaagtggccagtccatggtattttgttttctccattaataaacacttgtacacactctcttctctttagtttcggttatatgaggttattcaagtaatatatatatatatatatatatatagggaaatatgaatatatagatatactttatgcataaaaaacaagaaaaaaaaagatattttttcacaacattcaccaagtttaaagatagaacaaatgaactaaccacaaccacatatagattgttttggaatgaaaaatatcactgtttgtttctagtatgtgcctgatccttctaaatgttgtatctatgttctttacacaagaaacaattatccgttctacctgctcacgttttatttattatgtatctttgtttttgttgcagagattaaaaaaaaaggaaaaaagaacaatagaaaattggctgtaggggtggaggtgtgggtgtacgccagccctaggatttgaagttagggtttatggtgcacccatacctccacaagaaaaagtttttctgttttttttttttcttttcttttttcattttgcgatgactttgaaaaatgaaaagttcgattttttttaatatttcacttctctagtagattgaaacattcatacacattaacgtataacatataacatataacatgtaatatatacatatacatatttatctctacacttgtaaataaacagttgttaaaatttcaatctatttttctccatttctttgtcctttggattgttgcggctcactgattctcaatatactatgaaacgtgatagaaccgaattggaagctgatcaggctcctgaaaaaatcgaagaggactcttcgtcgtcctcttcaccagttaccttccaagatttgaatttatcttcgcaaacattgaaagctatagaaaagatgggattcacgaagttaactcctgtccaagcgcgcactgttcctcctctgttggccggtagagatgttcttggtgcagcaaagacaggttccggtaaaactctagcttttcttctacctgccattgagatcctacattctttaaaatttaaaccaagaaacggtaccggtatcattattatcactcctactcgtgaactagcccttcaaatcttcggtgtcgcccgtgaattgatggaattccattctcaaacccttggaatcgtcatgggtggtgctaaccgtagacaggaggctgagaagttgagtaaaggtgttaacttattgattgctacccctggtagacttttggatcatttacagaacacaaaggggtttgtcttcaaaaatttgaaggctttgatcatcgatgaggctgatcgtatcctggaaatcgggttcgaagacgaaatgagacaaattgttaagatcttaccaagtgaaaatagacaaaccatgttgttttctgccactcaaaccaccaaagtcgatgatttagccagggtctctttgaaaaagggcccacttttcattaatgtcgtgccagagaacgatcattccactgctgatgggctggaacaaggttatgtggtatgtgaaagtgataaacggtttcttttactattctcgtttttgaaaagaaaccagaaaaagaaaatcatcgtctttttatcatcttgtaattcagttaaatattatgctgaattattaaactatatcgatttacctgtattggaattgcatggtaaacaaaaacaacagaaacgtacaaacaccttcttcgaattctgtaacgcggaacgtgggatcttaatctgtacagatgtggctgctagagggttagacattcctgctgtggactggatcatccaattcgatccacctgatgatccaagagattatatccatagagttggtagaactgcaagaggtacaaaggggaaaggtaaatccttaatgtttttgacaccaaacgaactaggctttttacgttatctaaaagctgcaaaagtgcctctaaatgaatacgaatttccagaaaataaaatagctaacgttcaatcacaattagagaaactaattaagtcaaattatttcctgcaccaaatcgctaaggatggttataggtcgtatttacaggcttatgcatctcatggtctgaaaacagtttatcaaatcgataaattagatttagtgaaagtggctaaatcatacgggttctctgtacctccaaaggtaaatattaccattggatcttctggtaaggcaccaaacaagaaaagaaagacccataaatgattcagttttccctctgacttcttttctctttagattgctttatatcgacctctatatatatatatatttatatttatattatttactgtaccataaatttaataatatacaatgtgacttccagacacaggcatgcgctagatattggctttctccatactgatctgatcctgattacgtgtcacggtatcattccacaagctcttcccctctctttgcacgacaaaccggagtcaatttctgttttcttcttattagtttcttttttttcttttttattttttttttcttcgagggaacaaagtggaaaatttttatttatttttagagtcagattccttaaacatacaagagagtcatatctctcgaggtttatagctgagctgtgtctgtgttgtcttataaagaacctttccccctcctttggtggcaagtcttctcttgtttctctttttttttgttctttcctctcgcaaacacaccaaacctcctcaaatatctaatgtctgctgaattaaccttcgataaagtaaaaagtcattcctataaccttgcattagctaacaatttaaagttggccttggccattgaatactgcaccaaagatttaaaaatcaagatcaaccgtgatgatcctaatagtgagccacagttagttagtgataaagtgactctttttgacactaatgctattttgagatatgcaatgaacgattttgaaggccaagattcggaagaatatcaatacattttaactagattatgtcttccaacggagatagatcattccaaagctacccatgctttaaacaccttcattcttaataacatcaaggaaccaattacagctactagattgatcactattgccactgtatactccttaattccagatgaattcaaagctactggtcttttagaacaactccccgctcagatccaagtggctatcgaagaagctgttaaaaatacgccacgttcctcaacccaatttaaacacactggtgctaccaacattaaaccaggtttccaagtcagagatttaggtttagaaatcttgccaaaggatggggaaagaaatattcttattacttctgctttgccctatgtcaataatgttcctcatttggggaatattgttggatctgtactttctgctgatatttttgctcgttactgtaaatcaagaaattataacgctttgttcattggtggtacagatgagtatggtactgccacagagactaaagctttagaagaaaaggtgacaccacgtgaattatgtgataaatattacaagattcattccgatgtttacaagtggttccaaatcgggtttgattacttcggtagaactacaactgatttacaaacagagatatcacaggatatctttttgaaattaaacaaaaacggtttcttagaagaacaatctatgaaacaattgtattgtccagtccataactctttcttagcagacagatatgtggaaggtgaatgtccaaaatgccactatgacgatgctagaggtgatcaatgtgatggttgtggtggtttgttggatccattcgaattaatcaacccacattgtaagttggataatgccactccaattccaaaagtttcggatcacatatttttatctcttgataaactagaatcacaagtagttaattgggtcaacatctcctcagaaaagggtcaatggtccaagaactctaagactatcacaaattcttggttaaaggatgggttgaagccacgttgtattacaagagatcttgtctggggtactcctgtcccactagggaagttcaaagataaggttctttatgtttggtttgacgccactattggttatgtatcgattaccgctaactatacaaagaattgggctcaatggtggaaaaacccagaaaacgtcagattatatcaattcatgggtaaagataacgttccattccatacagttgtctttccagcttctcaattaggtactggcgaaaagtggaccatgttacatcatttgaataccactgaatacttacaatacgaaggtggcaaattctccaagagtagaggtatcggtgtctttggtaacaatgctcaagaatctggtatctctccaagtgtgtggagatactatttagcatctgttagacctgaatcaagtgattctcatttttcatgggatgattttgccattagaaataacagtgagttgttggctaatttaggtaactttgttaacagattaatcaaattcaccaatgctaaatataacggtgttatcccagaatatgatccaagaaatatcgagaactatgatactgttgtcaaaaatattgattcaatcttagccagctatattaaggaaatggaagtggctcatgaaagacgtggtttggaaattgctatgaacttaagtgctcgtggtaacttgttcttgcaagaaaataaattggacaacaccttgttcgctcaacaaccagctaaagccgatgctgttgttggtgttggtttgaacattatttacaccgtggcctcagttatattcccattcatgccagaaactgctgaaaagatttttaagatgttgaatgctccacaattgaagattgatgacacattccacttagttttacaaggtggccacaacattaatcaagctgaatacttattcaaacgtattgaacaaaaggatgtcgatgcatggagagccaagtatggtggaaaacaagaatagatgaactgaaaaaaaaaggtttgatgtaatactgttaataacatatttacattatagttacaataaatagaatatattatgtttaaaaaatgtttctgtaaacaattatatatatgaaaatatcatagaattaatggcattgtattaatcatactgcttatattattttttttttaattattactttgttacaattgccttaacacaacccatgacgccattaaaaattaaaattgtatcgccaatattaatttcgttcagtttaatatcatcttcttcaatataacccattcgtaataaataatatctaaatataccacaaagacagccactccgtaacggaggtgttatccattgaatacgattttgtttatttttacgggaaacggcaatgttagtgatactaccttccattacaaagctgctctgattaaatagcaatatctcacatttagttttatttaagtaagtattattacttttagtaatcattctcatcattctctctctagctaatgtataatgaagacggtttgttgtcttgaatgtggtgtaaggagtagttgatgtaattggttcaatatccttaaatatactccatatgttatttgatgtctcacaaagaccatttaataacgttttgtaaaaatattgagtacatgttttggatgtagtgtgttctgaagaaagattcaatggatgagcctcagtgataacatgcccatttttatcaattagtattctaatcttgtatatttgagagttacttacattgcccatctcttttaaattatccattaatgttttacttttatcaataaatgtgtcgatcaacaaagtaagaagttcgtttaatgtaagtggttccctgggacaatcaaaatattttaatgctaaattaattctagccaaatgttgtggaacaaataaacatcttgattgaatgaaatccatgtaagttgcatctactattattctatcatcaaaattttttatagaatctaggggtaatgataatttggtaagtgatatgttatttacttgtgaaaactccttctggaatatatgaaagtcttttgttccatcctgaatcatttctgctttccattcataaccattgcatttggtatctaacaagaaatcatcattaacagtagaatactgcacaactaaatcattatctgtatttaacgtgattccctctaatttggcgagattagaatcataccttaatgtacttaaaatttgatattctccaatcatatctcaacaatagctaacgaattcaccttattccctagtacgacattttaacttgaaacttttgtagtttataatactttgttgtgtgtgtgtccttttttgttccattatgcttgtcttacaaagtaaacatgaaaaaaaataaaaagataaaataaaaggcaatcaattacatctcccactatataattgtatgtaaaataaatagatccaacttgttatagcacatagtctaactcttcaataacttgatattcatttgtagacactggatagtaaggtactattgcatccacgtactggatatagaccttgttgtaaactttccagtacgcactacggacattcttggatggatggaacagacctgcccaaatatagttcaagaatataccaggacctactgcataacacaagcactctaaaccttcaatgattctagcaataacatggggagatgtctctaaaatgttgggaatcaacaaatttagcatatgaataaatgcatcctcatttccagatccgcaacaatgtaacgctaaatgctttattatagtggatgctgtttgtctatgaaccaaatctctatctatcaatgcatcctcaatcatgggagtaatcatatatatgtaatcttgtgacataggaccaatatattcaaacataaatgtcatcgcttttaaaataccattctgaatatttgtttcaggtgttttatattcattcattaatgctggcaaaacagtgtatggaccacatgtttcagctactttaccaatagctactgcagtagagacacgagactgacgttcttgtacttttagattgttcaacaagacaactaaaacatcttgagggccaatggctttagcaatatatccaaatgtgtcgttggtagctctcaatatatttttattaggacttttcaatgattccaataattcaaaacagattcttacccattccttaggtgcaacatagctagcacctctaatagccacagtactgatcaatttaattagatatgtttgaacctttatgtgtttatttcttaaaatgggggttaaagttggcataatttggtttacaggtggttgtaagttggataacgtcgaaacctctatgacagtggatatacatttaataattgatcctaatacctcagggtacacttcacccagagattcataaagaataatgcttaatttatttaacatgtcagtttcttcacaattttttattacaggtattataatattacataagtctgcagcattttgacgaattatttggttcttgtgttttaattgattaaggatagtggatactataggtgccaagaatggtttcatccttgtatctaaagatctcgccaccgtaccaaacccattgaaaataagagagtcttccgtatcttgatcctgaaatgcaatcaaaagtgcatcaataagccttgtttctaatctgtcatctaattcggcggtacctaagagctttactgttcgattgattgcatggattgccatagatctaaaagaaacagcttcatctcttaatgggtctagcaaattttctacagtatatttgcatcctaatttctctgataatattactgttgtgtaaactgtcatcttattcagttgtttatctaatgaaatacgtcttatccagaaattcttatagaaagaaggaccaatatcatttaaaagtaattcaccagtaatattttctaatttaatacatttttgtaataccaataagactgtttttttcatttcatcatctggacttgacatttctctagatattatttttattaattcagaagaatagtagcctgaatattctggatccatcaatggtataagagacccaatacatttcataaaagcagtaagtaatttgcctctatgtgataagacacctttccaaatatcttctaaaataatattaaacacttcaataccatatggattacacttttctgctagtattgatatagtattagcagtaagaattcttattgatatgtgttcatcataaagactatctttaagacagcgaattaatggaatcaaatgccttaagatatccatccccattaaaatagcaatttgttggataattttaacaccagtatgacgagctctccatgacttttgggaatggcacattgcatgtatatatggtaaaactttgggtaaacttaaagcttttgcaaccactgccaatgctttagaggttatgtttcttatgtattcatcttcgctgtcaagatctgctttcattgtggttagcatatgtccaacacctgttattgaggctaagttacttataacttcacgtccaataattcttgccactgggtcttcatcaattaatagcggggaaactacagttaaaatattacgtgtatatgatttcacagagtcacccaaacgatacagtattctatcgactacctttatcataagttgtctttctcgatcttctaacgatctgtccaaaagaatgggtaatatgctatcaaatattaatttaggaccaaattctatacattttgaagtcaactttttcatagccacttttctaactacagaattaccattcttgatctttaaaagaagaagtaataaatttctttcattttttgtttctgggctagaagaatcactattggcattttcatcctctattaatttggcaaaatgtaatttatctgaaggtttgaaatattttagatcattctcatatggcacatttattgcaacaccttgtaatagttgctgttggttctcgctattagcatcatttggctcaccattgttgactggcagctcatatgtttggacatcccatcgtgattcaccttttaatcttttaacagtggctacaccactaacatcttttgttttaaaggaggccaaacgaagttgtttatctcccttttcatcatccaatttcctcaacctttgtttatgataattatcttccctattatatatcgatctttcctggatccttttctgtaatacatctaaatgttcaggctgggaccctgtagtagtttcatcgatgacatcctgctttaagtctttagaaatagaataattggatccaagttgatattttgagtcttttgaattttcaatttctattttttccaatgacatgtccttcttaatattctagccaccttagtcttgtggtttcttatattaagtgtcttataagaagtaaaaactacagctgtttgtgtgaattgctctttcctctcaatttttatatacttatttgatctcttaacttttttttgtcgcaattatttttttaagtattagcgagtttagaagatagttaaaaatgtaagatctttaaaaaaatagtaatagttagtgttaatatttgtcatattaaagaaagttagggttgcaaggcttagtgtattcattaaaagtagcaagctctctttttttattaaggatcagttctacttttaaagagaaagtctagaaaatgatatattccaaagtgtttacaggattgactttgtcgattctagtattccaaaaggtgcatagtttagaaagtttagatactgagataaatagttatgaatatgtgactactcaaacagaagaggatgttactaactctagtatatttggtgctttaaactgtgcaacaactactgatagtttatcttcaacaaaggcagctgaacaaaagtatgttgactttgaagaggttttacacaaaacagataatcatgaaaatatacctgggattttaacaaactacccagttacttatccatacaccgaaaagatgaatttaagacctttacccaataatcatttattgatctctttcatctttgatatgagttctgaacccttttatccaaataaaaatgctctagattctggccaatattcacattatacagtatttcctaaaattataaaaccattattagaattgacttctacacgtcaattccaacttagatttacgagaggttattgggattcggagacatggggggcattgccttataatgggtttaaatcaggcggttctggagtagaattgtgggccacaatcgaggctacttcaaaagaaactgcatatgagaaatggaagactttagccaattatttaagtggccatttttgtgcatcaattaactttattgataattctaaaacaagtttccctcaatatactttcggtagtttctttaatggtaaagaagaaagaatacctttatttgatcaaaaaagagagaacactgatttatatgttttacatgcttctttagctaatgagcctgtatgcacagaaaatttgactccattaattaagtttttaccggcaaggggtaaaacgggcatttcttcgtatttggatggccataaggtttttgactccatttggcatagtgtttcaatcgatgttgatacattttgtgaacgagaagatggacagtgtcaatacaagatggaagctaatgttgacatggtaattcatgtcccaaatacccttgaaagatttgagaatcctattccaaaacctgtagccggtgataaattgaaatgtgatttaagtaaaccatatgatatatatgaatgttttcctttatctgaatcaacagatacaaatttttcattatcgcagttatttaataaaacaattaaaggttgcaacaatttcattaaggaaccgactactatatgtgttcaaactaccaatgaatgggatataactttaaaagtgattgaagatggtcaaaaggattcattttttggtacaccagacaattgttttgaattggtctcttcgaaagaatatgatttaataattgatacccataattctcaaaatgttacactcatcgatgaggtccctatttatgttagtagatccttgactgggtatggtcaagatcatggtggtttgcgtacgcttttgagaaatccaagtgaaacaccagttaaaattatcttctatgaatctctaccatggtttatgagactttatttatctacattaacagtggagagtactgatccaagtattaacagggatacaataatggaatcaatgtattattctcccgctaaagatagagaaaagcctgcacatatagaatttttacttgagattccaccattgactacagtgacattctcttaccaatttgataagacacttttgcaatttgcagaatatccaccagatgccaaccatgggtttgaaattgaggccgcaataatcactatcgtttcaccaaagctgtatcaattaagaacttccacattattgttattattatccacaccagattttagtatgccatacaatgttatcataattacatcaacagttatgggattaatatttggggttatgttcaatttgttagtgaaacgtgtggttactttagaagaggcagataagattttggttgaacgtagtataaaatataagctgttagtattaaagcagcatgtattgagaaaaattggattaacttcgtagaaatgaataaagagtatgtaattgagaggtatatacatatgtgtatatagatacatacatgcatggagagataatatagtagatatttgaatttgtattatttaaaatggatcttcgtatggatcctcttcatcataatcgtcatccttttcatattcgtaaacaatggcaccaccagaagatccatactgttgagcctctaagaatggcaaattgacttgttccttagctctcttttgtttttcagaggtagttaagttgaaagtggttaaaccttgtaacatttcaggtgtctctagtccactgctattattatcattattagtgtcagtattattgtcttttttattcattaaaatgtattcatgtttctttgaatctatttgaaaattgtattttaacgatctaccagattttctacgattaactaacagcaggctgaatacagagttgtttaaaccgcgaggtatattgaaaacttcaagcatatcacttaattcatggtgatcatgtactgagttgggtaagataggagatatttcaaggattgtagttgccataaattgtaaaagttctaaagaagatggataattgtctagaagatcattgtcagattgattaaatattaaagattcaggtacatctctatgataaatagctatgattgtgactgatggagaggcgatggaaccaataaactggcttaaatcggtgttatttaaataattcaaagaatctattataactagagacttactagtagtggtggtagatgaaagatgttttgtaggaggtaaagaagattgaattaattgagaaaccttattgatatttccatcttgaatatttatgaaatatgtagcatgttcaggtctattaatagaattaaatgcaatataaatcacttcactattattattgcagttactattgctattattactgttggattgcaaatttcgatgatgaataaattcgttgataacaccatgggatgtttgtgccatagaatcgatgcataatataaaagatgatgattcagttaaattgaatattctttttaaaaggatagaaggattatgaatagagctggacatagttttggtagttgaattgtgtctgtagagagggcaaaaataagacgacaagaatgaaaaaaggtatatcggagaattaatcttgtggtgtttatcaaagatgttcttcttatttcctgaaaatccaaaacatgctgctagagaaacaactgaactttcctgcacctatatttttataacaataacaatgtattttattatccacattcaccactttttactccaatttaaatttacctcatcacatggaaaaaaaaaagaataaaaaataaaattaaagaaaattggtgtcactaacaacgagccattgtgttaccatagcaacagagaactaccaaaatattgaaagtagtagtagtactaatattaatagcaacagtaatggtaatggttgtggttggtttggtttaaacagatgtgacaattgtgtaatgatagtccctcgtcgtttggcataattgtgtatactagctgggtgatttgctaaatgaagaacttcttttattcttgttctggctttgattaatcatatataatgttaataagtgtatgttcataagacaatgtagtatatgattattcacaagatgttaaatgttttccctatatcagtagtcactttcaaattcgtataaatgtgggtttatgttaacacttagtgtatactggactaacacaatcatgaatatacagaggaagagtcattctgtgtcatgtgattccttgatctataggaagagctcatacatccctttgtatgtggtactattgaatagactagtattccgcttattaagcttcagtatacatatatatacggttagatatatcaaaggaagatgtttgtgtatgtgtgtaaatttgttttatataagttatcatttttacactggtataagtattaagtgaaaaaatgtttaccgttaaaaaaaatatataattattgatgaatattagaatatactaaaaatttgtatataaacacacatatgatattttatacaaacattgaatatgcagatttatatacaaacaggtaattatataattacaagattataggtaccaccggataaattgataagttgtgagttattttgttcatttcgtcattttgtttccaaattaaatgtctgtcatatatggtccacaacctttaaagcatctcaatacagagatgcgacatggatttgaagagcagtataatagtgaacagtttctacagtcattagccaatgagttttatttctactatgacgataaaagacatagaacgaatggtaatccaatacctgataaagtccgaatagaggataaagagaaatattaccagcctatacccgattggaaagtcactaaagatcgtcaaaaaacagtaagtgcagctttattattatgtctaaatcttggagttgatcccccagatgtgattaagacttatccggcctctagaattgaagcatgggtcgatcctttgaattttcaggattcaaagaaggccattgaacaaattggtaaaaatttgcagtcccaatatgaaactttatcgttacggacaaggtataaacaaagtttagatccatgtgtagaagatgttaaacggttctgtaactctttaagacgcacttcaaaggatgatcaaattttgtttcactataacggccacggtgttcctcaacctaccccatctggtgaaatttgggtctttaatagaacttatacacagtatatcccagtatcactatacgatttacagacatggttgggtgctccatgcatctttgtttgggattgtaacagtgctggtaacattgttcacaacttccaaaaatttgttcaaaagagaattaaggacgatgaagatgggaatcatgatgtagcagctccatcccctacatctgcatataaggattgtttccaattagcatcatgtcgttctgatgaactattattattgcctcctgaactgcctgctgatttgtttacatgttgtctaacttgtccaatcgaaattagtatacaaatcttcttaatgcaatcacctttgaaatatactaaatataagattttttttgaaaactctaatcctagtgtaaataatgacccaaagaatgcatacaaaaccaatatacctaatgttcatattcctggaatgttatctgatagaagaaccccactcggtgaattaaactggatatttacagctgttacagacacaatcgcatggacttcattacctcgtcccctcttcaataagttatttaggcatgatttaatggtggctgccctgtttcgtaattttctattggccaaaagagtcatgccttggtataattgccatccattatcagacccagaattaccttcagatatagctaatcatccattatgggattcatgggatttggcaatagatgaagtattaagtaaactagtaagaacgttgaaaaattctcctccaacttcagatttggaatcacagttagttctacaacaacaggaaatgattcaaaatcaaaaaacaggtcctaacaatcagaatttaaatcaacaacaacagtatattaagcctggaagtatacagaatcaatcaaaatttgcagttgggaatttaagcacaatgtcattagcaactttaccaaatatgcttaatacaaagaaacagacaagtaataataataacaataacaagaatattttcattttacaaccacagcaacaattcacaggttttttttgaacaaaacctaactgctttcgaattatggttaaggtacatgtctaatgtgagaaatccaccagaacaattaccaattgttttacaagtattattatcacaagtacatagaattagagcactagtattactatcaagatttttggatttaggaccatgggctgtatatctctctttatccattggtattttcccatatgttttaaaacttctacaaagcccagcaccagaattaaaacctatccttgtgtttatatgggcaagaattatgtcaattgattataccaacacacaaagtgaattaataaaagagaaaggatatatgtattttgttaatatcctagtccctgaattcaatatgagtggacccttacctttaagcggttcatctttaggcaataattctccattgactatgaagtcgccacataatttttattctcaaagaaaacggtcaatatatgagaacgcaaatggagctacgatagggtatttaaataatgatactactgatgaacaaaaggcaatgacagtatttgtattagtatcattcgtaagaaattttccgttaggccagagacactgtttcagttttgaattaattaatagattatgtttttatatttcacattctgatgttcctttgttgaggcaatggtgtattatactactgggtcttttatttgaatccaaccctttgcataaatggatttgtatgaatgctagtgtgtttgaagttttgttaagatctttgaaggatccagttcctgaagtaagggcagcaactttattagcactgaactattctgtatctgaatcagatgaaccagatttgattttgaggattcaacaagattatgaaaagcaaactcagcaattacagactcagctacagcagataaataacacgttacaccaaaaacaaaatcaacaacatcaacaatatttggagcaacaacatactaaggtcgaacaacagttaaatatcaatcaaaccatgttataccagctggagaatattgatttgaagaaattaaaatcccaagagattagtaatttagttgcagtactttctttagttggggatgggtcatcgttagtaaaaaaagaactattaatatatttttcaaaattgatcagccgttatattaatttctttcttgttgttgccttccaagaattagcagatgacattgcacaaatgcaagggatagattcagacataatcaaatcgagagagaagcattctattagtcacagttcagtttttactactgtttggagggctttattaattatgtgtaatgatccatatttagagaataaaaaacttgcagaacagactattgattatattttattagaattgagtacacataaggatttgggttcagaatttatgaaaatggaaagttatttttggaaaaagaatgatggtttagtagcaaacaaaagaaatgaatatttttttaatgcaaaaccagctttgaagggaaaatcacctagagtattagattcatcaaaccgtaatgctgatgagtcgaatagtaataataatgacctgaagtcggtaatctctttaggtaatctctttaagaacatggtatttggtgaaactggtgaaaacactgaacaacaaaattctgataacatcaaaacaaaaaataaagatactggtacatcattattaggattgtcacatggattatcatatataccaaaaacaccttactataaagagcatgttggtaagattgaattaccatttaaaagttcttttttagattattgtaaggaatattttcaagaacctcaaatgcataaattagagaccgaagaagtcggtagtgttgagtataatgctagactatggcgtcggaataggaatgaagatatcattgaaagtacacaaagagataaaaaacttgcactttatggtgattggtcttgtaaactagtcactctggataataaaacacagcccaaaataattaggtttgttcagtttgagaatcaactgatctctagtgatgatagggacaatattacggtttttgattgggaacgtgggaaatgtttgtctaaattttcgaatgggaacccatttggtacaaaaatcactgatattaaatttatgaacgaggatgatgagacattgttgatgactggttcttcagatggtattataaagatttttagaaatattcattcaatagaaactgttactactgtagctgcctggagaggtttaacagaaatgttgttaacaccaagatctaatgggttattgatggaatggcaacaaagtagaggctctctattggctacaggtgatgttaagataataagaatctgggatgcacatacagagacagtggaggtagatattcctgcaaaaacgtcctcattggtgacttcacttacttctgatcaagttgctggaaatatttttattgcgggctttgctgatggtacattaagagtatatgatcgtcgtattgatccaagggattccatgattcgtcgctggagatctgctagcagtggtagtcagaactcatggataaataacgtgcatttacaaagaggtggatacagagaattagttagtggtacagttggtggggtagtagaattatgggatcttcgttcacaaaaacctgttttaagttttgttgatgaaaatactgcacaaaatggagatcaaaagagaataggcaacacattaacttctatacaagttcatgagcatgcacctgttattgcaactggttcgaggcaagtgaaaatatggaccacatctggtgacttgttaagtgtttttaaaaataatcagaattcaataactaataacgtggcaagcacattagcagctactggtattagatcatattcatctagttcatttttatcagggatggcgttacatccacatagaatgatgttaggtgctattaactctcatgatacacgtattaatgtttataaatgtacagaaaggtcattagtatactgaaggataacatttattatgtcaataataaatatgaaaagcattcatatagttctgttgataattattatttttcaagtgttttgtaattttattagtgtcataaaatagataagattataaataaaacttaagcaatatgttatcaagttagaacatgaaatagaagatgtgacaaaatttgagggtagtttggttcaaagagacgtagagtcgtaaatttaaaagaacagttagattaagctgttcctttggtttgaagaagagttcaaggaacgaataaaaattttttattaaattatttagataaatacgtgaatggcacatggaattacaaaattatattttcaagcatttgatcaggaaaaaggtattattgagctataagtactatagtacaaaatatttattaattaaattgaaaggtatttcaagaagttcaataataagaggtattgcgcttagtgagggtaaagagtttcttttttcaatcttaataatcaaaatttgctactatagcatggaaaagtacatgtattgttaaaaatggtaaagattggtcttaggttttctagtcactttaaagaaaggttaatatctggaagttcgttagcatttgatcttagagttgtattctgcattacacttaaagaaaaggtaattttatggatttaaatgatcctagttccgttgttaaaaaataattatcatgttttttgtgttataaagattatttttcagtatattggaaggaataaaaacctggaaagttggtataaaataactattaaactagtgagttcaaaaagtaaaggtatgatattatggatcacgattggcaaccattgctgttagggaagaaatagaatattttagttcatagagcacgtgaagtaaaagataaccaagtgttttgtgtattcagctaaataagcatacgtttgtaagtgcaatggcagtaatttgcataactttagtgattaagatatttaataaacttttaatgtaattatacatatctgtttaaaaatatatattattaaacattagattgtagggataaaatcattatataaacttaaagtttacatgaattcattgctccaatgattggcttctaaattgtctgtgtggctttcatatctatctgcagtggttataacaaactgtcgtcctgaacctttattaatatttccctgtgtacgatgagtagaaatcttagtataatcagatggaatgttcatgaaagttctattttctttattttcatcttcaaggtcatcatcttctttcatattacgataatcagtttcataacttgataattcataagaatcaatgtcattcctattatgataattaggtcgatttacgttactattttgagctctatccgaaatattatccaaaacttcagtagtactttcacctattgcagttttaaagactaaatttggttgtccttcaagtgagatagtcgtttgtggtaattctattcctggaaactctttatatatgtacctaagtaggatatcatttttgtcgtgcaaactgttgtggaaatgatcttgttttctagaattttcctgatcttcatatggtaactcatgtttattatattttgtcctttcatgtcttatcgatgagagtatttcttcaaatacttctggattcaccattagcatctcttttaatccactgcacatcattcttttagatttttctattatttctaacgcatgtgtaaaattttcaaaagtatgtaatatgtaagtctctctaagaccaatagatatagaaccctgtaatagctcttgttccatcccaaaacgtttcttactgtcttccatcatagttttaagcaatatactgttatttactggtttctcgtgtttctttaaaagtgaggattcatatttttttatagagaaaatcattttattctgtgaaattaagtagttatcttcctttactgatacaccctgtaatatagataaggttgaatttaatgattgcattactccagtttcataagacagctcgttttcaaataagtttatcagattttgtgtcattaacgtaatatcctctttgttacagatgtcgccctgaggagtccaatttctaagatcctttatagtttttctcaaaagaaggctattttgatttttcttggtaatataagcggtcaatcttcttgcaacatctgataatttaacatgtgtagatttgaatcctatatgtgaatcagacatcacagattgaatgttatctagaaaattacgtctgacagggatattaacattttctttcttactacggtacccaatgaatgctttaccattatctaatggatttcgaggaggtatcattacttcattattttcaaagttaggtctattacttgttaaaaacgtcttgttactaattgatgaatcacgctctagttttctgttatactgttccatattattccttaatattttctgttggtttcctttaagatttggagaaccattgacataacttctagtacagttatcatgaatactttggttttgacgattaatttccatgtttggtctttcatgataatattcatatacttcagaatcttcttctacaaaatctttttcattgctttttgtaaaccaattcttaatttttgttcttttacttccactttgtggcctgtatctactcattctgtattgttcttgattatcaggaaatggcgaattaaaattgtcatattggtgatattgcagattgttcattctttttatattgaataagttttataccagctttccgaataaatgaaaagtttccctacttgaagtgagcaattttataaagtatatagttttgttggtgcaatattatgagaatttactgaggcttgattctttattactacactaattatttgaatattacctttatatttcatagtcttcattattgctattttttatttttttttatttttttaaaaaaaaaatttgtgtcattttaattttttgaaccctataaatttaatctaagggttaataaggacagagggggattataaagatcatataaattctgcaaatggttatttaaatggatatagtttgacaagacgatattcttttagtaaaacttattctttataattttggttgtattggtcaaaataatgttagaactattaaaactaataatatatgtattaatgttgttcaccctgagatgcatataataaactgactccactttttcttttttccttgtttagtgattctgagggggagcttttcgttgaactggttttaaatggtataggtataaaatcttcttcttcaaaattatttttattttcaaaatttagagttttgaaacttgaagataaaagcgtcatactaatacttcttttatgtttatacaaaagttctttcttaggaatgattttttgaggagataataatgattcattcactggttcattctcgcttagattaccttgatcatcttttactttaatagttggtactacattttcacgtttttggtactcagttagttttgtcttgataagacttgataatcctgataaatgatttttgaataaatctaaaacaatactagaaagtctaatcactctatcattaaaatcattgtttataccacgtatacgtaagaaatattgtataaaagggatatcattttgaagagaaaataatgaatctatatcaccaaatttcattaaatgaatggtaataagctcaatcaatctgagcttaggagtggaaatcatatttaaccatttaatattctcgttctttaacacttcatctattaatgtcataggtattaggctatccggtaattcaagcaggaataattttattaaatcaatccagtcctttaaaacaaatttggaaccatttctatagtgttcaatgattaatcttgtagtgtttgtattaatatcatgattgaaagtcatgttctgaaattctgtaaagaactctctctctaaattagttgctctaacaatatcaagatcacttctccaataatcaaatatttgttccccatcaaaatttgaactatctatttgcttttctatatgtttgataattagactaatactattgatgacatcatctgtgattgtagtacaagaaaacattgattccaatataacatacgaagatatatcatcgatatttattgaccattttgtatagggtaatgaattatcacgattaaaaaaaccaataggtgaatatgactgtttattaaattgaactatagtgggaattttattctcagacaaattatttaccggaacagaaatattgtttatatatgtttggaaattttggttaactgattgaattagttgatttgttttgaatctatattcagcatattttgtgcaatgggtgaagaaagttttctctaactggagtcttgtgtatagtaatcttttatattgttcaaaatacttactttggtactcttgtaattgaacaagttttttatttatttcttccagggttaataatggattgttgatgttggatccagtgactgttttgtttatctttctaaaccatagagccatagaagtagatatgtttctatgcgcaaaagtgtcaaatttaatattggtatttttgtttaaatcactataggatttgtgtattttagagggtataatttccgtagaggtttcattttcaaacacatatggattccatatataataagattcaagttcaaaagttggtgacgattctgtggtatttttgtgcatattaaagttcagtttaatattattaaaatatgatctactaataattggataatactcttgaaaaaattgtttacttaatagaagttgactaactcttattaggttatacaaagacgtgtctagttttggattaatttttttcaatactgctactaaagaattacctttgaaatattcatttaatgaacctagcattgaggtaaaagtcttttgataaataagttgactttttattaaagataggaactgatttaattcatgttcattattgaaagtcaaaacatcatctaatttgaatgggtatattatattctgaaactgtaaagtcttatttgtggcggatcttgtattttgtgcagtgatagcagttgtagtagtttcaaaagagttgttgatactatctgattgttctgattttttatttttttgtaagtgtgttaaactctttaaaatactacctgctaagatttcacattcaacatatgattccttagtcgatttaaaagtcttttgataggctaaataatgttcatttaattcattttctatctcattataatataatttattttggctcagacgtgtagataatggaacagtacaagtttcagttatattcgatattccactattctttattcttagccaaaattgattaagtacagttctacttaatgattgagaatcatttgatttgtattctttgttgcatacagtttccaaactgtcaataagtggtgtgaaacaattcaaagttacagatctgtagaaatctaattcttctgaaaggcatttgttatcgatcttgactacttgcaaaaatgtttcgatccctgtgatataatctggtgaccaaaatgaatttcttaaattaagttcactatctttgatttgatccataattcttatgtaaggtatcaaaaaaaaaaaaaataaaaaataaaaacaataaccgaatggattcaacttaatatatgatattttgacatattatcttgttaactgtttagttcattcattcatctcagtagatttaaattgtattgaacaaatatatgacttgaagtatatacaagtatctctcaaaagtataatttttaatgaaacattctgacgatgttaaatattatttttttttttcggtcttagagatttccaaggatattgattgcatagtgctttaattaagaataaataatattatgaaatattaaataaactttacggttatataataaatatagaaatatgcatatttatgtatgagctatgttcatgagaggaagatcgtcatattttccctttttgtgctttttcttacatatatatattcagatagctaattcattataatttgaataacgatccttgactttaaatcccattattttaagcccaaaagtaatataatatctaatcttattaatgaccattctagctaaaccgacagtcttcttacggaacctaggagtctctttattgttaaatgcaatatcagaatcttttaaattcttcatttctgtagtagtaggtaacacataatcacctgcagatagagatacaaataaggtaaatgggataaaccagatacaaattccaaaaaaggatgccacttcagtgaaggtggctcttctttcagggatataatttgggttgtatctaaattgaggggggatttcaactttattaaagtattggaaccataagtaatgatttgtcacaacaaagatacaactcaaaataaagattggactagtaagattaatgaatggaaatttctttaagttctgtaaatatacgatatgtgagaatattgcaaaaagagtcaatttaactggaaatctatcaaataggagtaggagtataagaacaccgataaccccatatattgatttagtcaagaatcttcttgttggttctgaatattcctcgactaattcactgatataatatagacctgcagcaattgatagggtcaaaaagataaatcctaggatagtcccagcataagatatagcctgtaagatcatactgtttaaaactattttgcttttctttttttttcttttttttctttttttgaaatgtattcaacgattcatgtagttgaagaggtataatgtatgagagatccctttatgtaagttggcatcctttattctactcaatgctggttcactcaatcactcactcaacgtttaaaggtcctctctttttaagccgtcgaaacccaacaagaaaaaaaaatgacgagaaatttttcgaaatattgaaaccctcttttagagttattgcaagacttagggtttatggattttcttcgagaaagaaaaaaaacgagaaatattgaaaatagggcattctttattttagttaacagatctgtaggaccgtgttcttcttgtattttatatatgtttagtgattgtttctctcattgaatatagtttagtcttaattttaaaaagtatcgacgcgtttgaatttaatacaataatgaatcttctaaggtttgacatgtaagccaatgaagtgtttgtgatgagttgcttctctatcttctattcaatattttaacattggtgtcagaagcaagataactattaaaattagcagaatttgtttagtgtaaaaatatattcttgggataatgaaggttagtgttattaactcctttgtgccagagtttatttatttctctgtttgcttgtatttttcagagaaaaaacatgaatttgcaaggtttaagtagaaatcttaaagcattgtcgactttataatgatattagatactttggccttgtattattatagtgttaagatatgtgtaaaaattactgaaagaattttgaaatatcagtaatattatttgatgtgatgttggaaacaagtgttttgatagaaaatgggggagatttattagtatggttgtgtgttggtgaatcacaatagatagtcgataaattagtggatagggtgtaactagtatggtatagaatgtgaagcacaatagtagtataaattatatttaggtgagtaatatattgtttgttgcagatatgatatgtcaagtttgtttgactatagatatatatatataaagtagatgtgcattggttggcccatagttgacagctattttaaggaaagggtagtagattagtttgtaaaaaaaaatttatatttttagtatttacattataatattacggagtattttggagataatattcaagatatttaaatacaataaatattaatcagaaaaaaatcatcttttcctcaactttctgtcaaatatttgaaaaaaaaatctgtgagtagtgttatctatatatatatttatatattcttaagacaaattgtataattatgtgcaatttaatttggcctgatattgtaattatggaaaatgttctattaactgtgaattaactgttataaagatttcaatctaactggttgatttagttcccaaatttttgttggcacatttcaataaatacaagtatatatttaacttcacaagtatcaagacagagttccataatactgttaagaattacctcccccctataataagtgagtaaatcacaaatattttcaatactatattatatattggttgtatacaaatttatgttaaagttattcaagtttttctatatgtatgaaatatatataataatgtataaaatatacacaaggaaagaaacataatataaaaaaattgttggttttatatattttcatatctggtatataatttccataaacggcaccaatttattaatacgttttatttacatttacttataagccaacaatttattctccatattctgatgttattttatatttgctagaattcaatctgtctatctatttattttagaacattcaatttcagcaataagtctttttctaaaagtgtattactgatgtcttctctctacaaaaaatattttttaaaaaaaaaaaaatacagtattaaagaacaatatgttgaaataaaatgttctataatgaaatagatggaacaataagattttagcagacactaaaccataaattgttgagtaataatcgttaagaggtcaccaaaagttgttgagtttgtttattaaatatcttactgttcgtagaggaaaatggcttaatgttaacatatataaagccaaggatttcatcatacattatttttatcttatttacaatctttgtgtattattacttctatgttgtatatagagaaagaaagtgaagaactttattataattttgtgtactaaatctgtttaatataatattgagaatgtttactatatatccaatgaataaaggcgctcattctcaacacaatatatatatattgttggaatttggagctcttggcatccatggtaacggtagacatcattaagttatagatgcttgttgtattatgtactaaatacatgtatatacttattatatagcgtatacagtataagttcttttatttacgtcaagttttcttttaagtttttcatttttcttcaaatctctaacaaaatactgttggtgaaaaatgaaaaacttaaaagaaaacttgacgtaaataaaagaacttatactgtatacgctatataataagtatatacatgtatttagcacataatacaacaagcatctataacttaatgatgtctaccgttaccatggacgccaagagctccaaattccaacaaatataatatgagggtatctttttatttttcactaaataggttttctaaagacttgaagaaaaataagaatttttaaagtaactgttgaaagaaataaaatagtttacaccacataaagtagacaataagtaaatacatatattgaaggtgtaaaaagatcaggtatatatgactgatgtttgtcattatcatagatttagaagtttcaaattcgaacgataatatacatgttaaatatatacttgtatatgtacaacaagttcaatcaaagtaaaactcaataaaattattatagatttacagttaatacttaagagtatttaaataatatttaatgatgtatatgtttcatattaaaattcgagagagtgttgtgaaatagaatagttataaccatcaagattacataagattctgaatgaatctagaactaattattgtattaataagccatacacgtgctacaacattagatgctgcataataaaaagattagattgcataagattttggcaaatctagaatttacctattgttttaataagtcccacgtgtattactaatcaccatgattagagaattggggtgcagttctaatccactagtgcacctaaattaatgtaataaattttggggtgaatcagtcaagtcattaatgtactaatctgaataatcgatcgagctccagaaaacatataaaaggacaacgtttcctggaaataaaagatcatcttccataaccgtttcttgtaaataatttatatattatatatgaacaaaaagagaaaaacaagcaagtaacaagttaagtaactttgaataaatatattagctcgatataagccgctcaatatataagaccgttttagtaattatattatcgcctataattgattactgtctcgattacttgaatgactattaatattatttgcgcttccctggaatacacaaagaatttcaccataccatattacaacagggggtgtctcgttttaagactccatggccaagctggttaaggcgtgcgactgttaatcgcaagatcgtgagttcaatcctcactggggtcgaattttttatcttttggaatattttttttaggatttggagcagtgaatttttgaaaaggtgaggattactaatatttttctaaattttccctttttggttaactttagaagaaatagaccttgaaacttgaaatataaagaatttgtaagaggaacatagagacatacggaagtaggaatggctaagaatgaagaacaacaactgaggataaacaaccaggtatttagcaagtattatacagttacagtagtgtggtttttttttttaattttatatttggagacgataagctcagtttatatctatccaaatgagttattattgtcattattattgtgatttctaattgcagtattattagaagctcttaatagaagattcgtcacagtagtattgttcataataaatccataataaggaaagttttactgtaaaaaatctacagtaataatataagatatatggttcttgattatgctatccacaaataatatatacactacactatgcttgaggggtattactatatttaaagtttgtaaatatttttaaaataggggactgttgtcgattaaagactttgtaatattttgtaagttaacaacagaaaattatatgctatattaggtgtcttgacagaccatacattatgattagcaaaatatttttggaatatcaatactgttcgtcttttctatatataaaccataataagaatgatataattattctttgcaatttttgtagcatcaaagtctcaaatgattttgatttaatagaaatattgaatatttctcattatttaataaaaatttgtgtgcatcttgtgaagaatctttttttttcttattttttctttccttggatcaattatcagtaagctggaactagtcttgagaacatagagtgactactttttctcttttatcaactgttcgtattacgaagtagtattaggctaaggaaaaatagactatatatagttcattaaataatgacgtaaaagaaatatatatatgtctaagaaaatataaaactcaatataaaagaaaaaaaaaattgaagtacagttaaaaagctgaagaatatcttacatcaatttgctgattgactatatttgaatcttacatatattagaaacaggtgctaactttatgctatataagtgaacataatggtggaatcaggcgatataaagaagacaaatctagatgtcatctataggattgtcaaatttattaataataatccaaagagtaaaatcatttttatggtaggtgctggaatatctacctcctgtgggatccctgatttcagatcccctaagacaggtctttatcataacttatctaaattgaatttaccatacgcagaagctgtatttgatattgatttttttaaagaaaatcccaagcctttctacacgctagcacaagaattgtacccaggtaaatttaagccatcaaagtttcatttcttaatgaagttgtttgaagaaaaaggacatttacaaagaatttatactcaaaatatcgatactttagaaaggcaagcaggtatcaatccaaaatatattattgaagctcatgggagttttgctgcgaatcactgtaccaaatgtaacaaacacttcaagatggaatatttcaagtcaaaattgtcaactaagaaaataacggatggtggtgtagaatttgattacgctaaatgtgatgaatgtcaagggttggttaaaccaaatatcgtgttctttggagaaaatttacctaaaagattttttaatacttgggatcaagatttggaaaaattagaaagtcaatctgatagtagtaaaagtgacgattatatgattgttgtggcaggaacatctcttgaagtttatccatttgccagtcttccaatagaagtccctggtactgtctcacgatgtttgattaatttagatattgttggagatttcaaagataatccacgagacaaagatttagtgtttcaaggtacatgtgataaagcatcccaattaattgtatcaaagttaggttgggaagaagatttaaagaaaatttatgaaaatttcgaaatagaaacaattactttaaatacagaaatgtctaagattgtatcagaaatgaagaatttgcaattatgtgagattgattttgataaaactaatatcttagataacaagcaagaagagaagaaagagaaaacctagaatgcttcataaaaataatatcctataactatatatatatatatatatagttatgtatttatatttaggatttgatgaaggattattgaatcctacccttttaatattaaatggccaatataatttctcatattaacagcatctttactagtaaatgttaattctgagtctttgctcaaatacaacgcattcatacaaacatatataccacaatcgaatccgtttggttgttgtggacagtcaccatgtattagttcgaagttttcgcctatagtatttttgctctcttcaataacataacttttcaacttatttaaaattgtcaaacttatcgaactaggtccttgactcaaagaatctacgtagataattctcttcctttgaatatcaatgaaacctaacgcccaatgcgattcatttaaatttattggaacaaaaatcttcttcaaattttttatttcaactttcttcctcttcatccaccttctaacaccttgatatcctctttgtgatagattactataaaaaaatgaattaaaagcaaccgtctgtggaacattccgttctatatatttcatgaaaaattcaataattgtatcatttaaccatcttctcggagctaacgtcttaaaatcacggatggtcacttctatgttatctttactaaataagatagcgttgtcatgcctctgtagagttgatttaacggaagacaaatctttgtcagatatatttggtattaaaacttgttgttctctttgtttctttgcttcttcttctcgttgctttttaattttattttggatttgttttctttcttcgagtaattgtttataatttttaaattcattttgtagacgtagtaactctttcctgaaacgttcactttcttctaagtatttttcacgttttctttgtaaggatgcttgtttatattttctttcttttatgaatattaaatcatcagaattatcttcattatttactttaactttgtctattttgttcgatggttgatgatttaaaaggacatgtttaatcctttcagttaaatcaataatagattttttgaaagaatgttcattttttgtatcaaagctctttcgttttttcagttcattttctagccattcttgtgatagtttcttgtcttcatcaattagcctcaattgattttctctttcgtctgcaataatcttaggaatttgatactcaccattaaatatctgtcttaaatatgaaacttctcttgaataacctcttttgattaattctatatcgttgcccaggttattagtggatctattaaataatttatctcttctaataaaagtagttccataattattagattgagaagcagcatttgaacctttaccaaactcggtagtcttccatttatcccaaccaaagggatctttcgaaaaggttaatgattcaaccttttttgaagttacattaggagcgggattagcatgagattcctttctattctctaaatctagttttctttgtttgtttgtaatgaatagataccctttttcactatatcttttcaacttattgctgctagtatgtggtctactattaaacaatgttttgcctgcagattggacaatattaaatacgcttgttgaactggaagtatcaggagatgattgactggaggagacattttcgttaggcggaagtgaatgttctaagtcagagacagtcaacgacctgttcataacataggaattatttatacgtctctttgggttataaaaggatacactacgtgcgtttttatcaatatcaaatttttttacactatggattgatattggtgagtatattggactgtatggatttgatagttttggtttcttataattcgcaacagacatttggattcaaaaaaacacacatatgtttatgtttacagacttttttcgtgatatttatgttaatgtacacggttgaaagactctaagacttttattgttctatctctgttctatatcttattgcaaagtctctttaattgaaaagtttttgctttttttcacttcttcaatgatgtttaatttttgtctaataaaatggataaagaacaataaatctgtatatataaaaagagatagagagatagataatccagagttaggcaattttgaaataattataagacatatgtctactaataagcttaataatttatgcatacagtaaacccaaaaaaagttagtgtaataattaaggaaagatgaataatagatatttattatatatagatttagatatagaaataaagatgtagaaaatatggatacatatgcaaaaaaacaaaaaaaaaggtaggaaaaagaaaaaagagaagaggaagttttaacaacaatttgaacttgatccagaactttctgacccagtcttgatcttgacattactatctttagaggtaccggcattgttagacatggcatttctatctatcttatcttggatcaatttagctagagtaaagaagatttcatttacattagaatcatctttagcactggattcaataaatggtaaccccaactcttgtgccaaagcttcaccttgttcatatgaaaccactcttgtatccatgtcgctcttatttccaactaatagtaattgagcatcatcattggcatggtcattgactgttttgaaccattgtttcacattagcaaaagttctttcatcagtaacgtcgtaaactaaaataatccccatggcaccacgatagtatgctgtggttatagtacgaaatctttcttgtcctgcagtatcccataactgtaatttaaccttcttaccgttgatgtctacagttttaatcttgaaatcgataccgattgttgttataaacgatggggagaacttatcttccacaaatctgactaaaagacaagatttcccaacacctgagtcacctattaataagattttcataatagaatcatagtttttattattgtttgacatcttatttctttttttcttgcaaagacaaaggaatatctagttgtttgaataaatgaataaatgttatacggtaggatggatagttcaggtaaataagcaaacgtcaaaaaatatttgaaatggtagtaaattattatagcgtttttatttaaaataattatattatacccctctaaccttcacacacactttgtattttcttttttatttttacaattatttatttaagctcgtttttttatctgtgacctttggttgtttcactttagatcttcacaataaagtgttgtacttacttccaattgagtcgattgctgtgccttgatataccttatgtattgttagaggcctttatacaggaataactgctgtagccaaatttccttcctttcaagcaatctgcaatcgtgtctctctgggtttttcactcttttgattttttgatcgttgctcgttttattcagaatttctggttctcattcatttttctttttttctgtcgtgtatttctttttttttttttgaggttgtctgttttgggaaaaagtcggtcacctaatgcggaatattgacggaattgaagaacctcttacaaaagaaaccaagtcacgtgcttgcatgagaatatttggcaatcttttcctgagtgtcacattcttttgaataaaattatactaaatatacagcctatcatgctgtatatacagtaatatatattgatcgtaatcattgttattagatatatgtatgtatgtatgtatgtatgtatgtatgtatgtatcagatgtattatatgtatttaagctttgatcaactagagactataaagctgaatttatctttttatgtaattatttttaacatcttttattatttcattaatgttgtccttttttgtctttttttatctttccacttatgcataataactcctccataagacaccttctaaatcttctaattcttcatctgtaaattgtgtcctatcaaaataccaagtatcagttcgtacttttttaaattcagagataatgttttttgctgatttaccaacaataccactagttctggcccatgaggataatcgagataattctttcggtatccatcttggtaagggaaacacatatgggaaagcagatatgattgaacctaatccaataatactaccatggatcattgtgttacttttagaaagtttttgcttttcttcccatgtgtatccatccaatttagagctgaagttatggatcaatttttgtaattctgcctcattatcgatgttgtgcacaatatcggataatacatctgctgcacgatcgcgtacttccacgtattgttcgttataaatattcattacaatgaagtccgtgattttgtttctttgtgcctcagtcagttgtaatagttgagatgacagataatgttcaacaaatgcaatttgtaacttcaattgatatgacgatggtgcagaattgaaaatctcgaaatcacagattagatttagtatgtcatcgatgttgtcttttcttgatgggatgtaagctattgccaggaataaagtggcaacatctaatccagccaatttacaaacatctttttgtaataaaaacctcattaaaaatggtaaaatatattctgcaatatatggaataataatgactttattagatccacttgtcatttcttcgatccaataaaatatagaagatgataaatagaaatatcttgtctttaaaatctcttgtgatgataaatcttccaacttttcatattcaatatcaatctcgttaaacagcattctaattactttatctaaccttttggatacatgtttcaatggtaatcctagccctgtacgattatctgtctcattttcaacgtgtaatagggttttggagttgtttaatgaaggtgtgcattcattctcaattatagcagcaaataatttggcagtggcagatcttatttgatcatgttgataatcaaatctgatatgttctagtaattgtgaaagatcaggtgaccgtagtccaataccagacaaaatatttctatacattaagattcttgatgcctgatgagccactgtgtcttgattagcatcaaggaataattcatttacatcacctaaattagccaataatgttttacatcttctaatatcaatagtggttggtatccaccaacaaaaagtgctccagatctcaaatgaatcttggttcaggtcatgcttgacatattttgccaaatatttattaataaaatcatttaataagtctagttctttttttgataaatatttgctaccacatattaaagcagcaaaaatttcaacagacataatcattgaagatttgtcatatctatcatagcatttatcacatatatcaaatagatcttgtaaacttatattttgagtaaaatttttagaaaatagaataacaactagcacaaagaaagaaacatccccagtactgaaaactgtacgagattcattgtcttggattaaagtatttgtaaattcatgtaaccattctttggtaatcatattgcctaatgtttttacaatttcaatttcatttgcttgtaatttaatatctaagggtttattaatcaaaactttcatttgacttccccaacataaccagccaacatatgggggggcatcgatataataattcggtgattctgcattgttcatctctttcttaaatgattcattaaatgcatcaatacttgtgtctattatcttaatatatttgggatcatatttattttgatgtgccctattgatatcatattcataatcagatagagaaaagatcttattaaaaatagtggtgagtgatctagcaaccaggaagatgatatctggatgtttaccattagtttgtctgaaaagtgttgatatagatttagcatcagtggtaatttctaagtttgattcaattctagaaatgaatctcactattattaaaattaatctccatgacttttcaccagcttcacttaaaatatcaagtaatgaatcttttaatgattgaataagaaacatatagtagtttcttttattattttttaaagtttttactgttccaacatatgaggtgatatctaaatccggtggttcaatggaagtaaacatttgtttgtcatggatgcatacactagatgggaattttaatcctgtaacgtaatcattcaaaactttctcggcaactatagacacgttcaagtcattaacttttaaacaatcaattaaaagcaataccaatgtttgcagattcttaaaatcaaacattaattttctgtgaattttttttaaaagaagcattttgattgtaacttctagtctcttagtgttaccctcttccaaattctccttaaggagactgataagtgatcttattatcattgggtaagagccgattatttgtttcatacattgtgttatggttccttgagctgagttgtgaatatcaggatatgaagatgtagataaaactatcatatccttaaataaactagtttcaattttggaaggatatctgtttgaagaatgaagcaaaacacggttttggtgtaactcattaactttaactgcgaaaaacatcctagtatatggttctttaacatcagccaatgattgaatgttttctaggaaatcactctctataaataaattcgaatcatcgttaaaaattgtttcttggccaacgtcagtgaagaaaactttaacaccatgaataataatctgattcataatagtgttactttcatggtaagttctaatgaattcatataacttgtgcaaaaaggcacctattttcgaccttatcttatgtatctcaaaatattgtttatgctgtaatttttcttggaaggtattgccaaaatagtaattacatgtaaatatatctagctctctaaactctggtgctagttccgcaccgttatcatcactaccttctcttataacagtactttcaaaatgtgctggagtacaaagtcctgaaggaacctcagatacattttcaccagcaagattatcaccaccaaatattaataaattttctttattggtgggagttcttgttatattaatattatcaattttaaagccaggtgtgttctctttcccactattatcaatattatcatcttcttcccattgaatggaattaaaattttgcaagatggaatacttatgagaatcagctagagcattactaaattcactaatttttaatttattttcagtaaaatcaggatcaaacaacaaacttatgccagacaatgcatgggaaagaattaaaatgaacttttggattgtatcacaatgtagagtatcagatttagatgattctagtaaattgttaatcttttccatgcaccaagaggagatattatcaaatatttcaataccagcttgaatttccttgtcatcaggaataaaccattggaaattcatgttggcagaatcgtattttctgttatcgaattgtaaagcaccccatttttcctcatatggaatgttactgttaggtgcaaacaaacgagactcaacgacttcagtaatagttagggtagtaagagttgtgtgtaccattattgatgtaattacatctagtggtggattcgtaattttctcataaacatatttcataaattcaattaattcatcctttacttctaaaatagtctcatgagattgtcttaaaacatcgttaatagaatttagatacagaaccaacttaacatctcttaattggatttcagaagagcttctcacggaaccagcacctctttcgatttgttgcttgatatggtgcattagattggaaataatacttttacttaatttgttgtttcttttaactaatgcagccagtggagtagagataatttcataatttggttctctttctctaaatgcatcattatcccaatatatcttttgtaaatagtcagcaaagtattcaaacattgaatcatccatagattcgatcatgatcattgttgtttggttaattttggttgccaagggatcttctatctcaacgtcaaccatttggaacaacttgttaatgtatgctgctagacagttctttaaaattgtagtagagcctctaaatgcattcattaataaatctggatcgtatttaaattgagaagagttatgatcatcttttaggaacgcaaaatgttgttcaattagaggagcggtattggattcaaaatcaatgttttcattttctttaacagggcattctaatggaataaaagtagctatagatacgattccattaatcagattactggtcagattcatatcattcatgtctattttctgaatcaacaatgataagatatgaatcacatgaattctataaagcttatctactaccatgtatctaacaattcttgtgaactgctttaaagatgcgataattctgtgtctagaattgataaattcttcagcaaaggagtcgtagatatcgataagaaccctatcaaatattaaatgtgaatttttggggtttaagttcaataaataggcaagactagaaatgtgatagttggcgatatccgcatctttattttgtgatccgatcattagaattttcaacattattttaacaatttgttcattactgtcgttcgtgagaaagattttgtgatttagtgttggaatagatttatctttaataaactgttgttcagtctgccatcttttatgatacattttaatgaatccatgaacaaatttagctataattctagtccaaaacccattatttgaaggatgcacgaaggtctctattgaattaatcaaattagtcaaatactggaaaaaaaaatctgtatgctgtccatttatggaatatataaaaggtttgacagttcttgaaaaggaatggatttggccatccgatcttaggtgaccttgtaatctattaaacaaaaagatcatctgttctttagtgaacagtccatactgattaaagctggccaacaaaattggatcgatttccttatctgagacaacaaaccttgaatggaaattctctgatgtcgaaccgacaaagtcgtacatatgagtgtccactgcgacgttgggacttactgaagtccagatagagaaacaaaatgggaaataatctgttgtactattaccgttactgatgttggcattgaaagaatttgtgctcttgttggaatctgtttggaaatggaaagggacaaaagaagtgatcattggtagtactattggcattgtggatggagcaagactagacaacaatttgttcattgaatccgatacgatatcctgccccatggggaaaaacggtctggagatgtgagccaattttaataataacctgaaaagttgtaaatcttcctttgattgaatatcaaaacgaacatattctggatcaggatacggtaagaattcacagataaaatcgaacaaaggcgtatggtctaattgtaagcctttttcttttaagacttgggtgaaattgtaggttttatcctttgattcgatcaataattccaatgtttctacatatagctgtctataaatcttttggcccttagtcaaggagagatagtagtatgtggatatcaaagcctttcttagttccagaggcaaggggaaatccaggcaatttttcaattcgtttgtccaatggttgacattaatgataaacgaggatctattagtgattttacccatgacattgaagttggggcccatagtgtctaaatagtcatcttcgttagatatctctccttcctccaattccaaacattcttctaattcggcattcatgtcgtcatcatctattacatctgtatcgtccacatcgtcaacactactagtatttccgctactattaatatgactggtggtggtggtagtggtagtggtagtgatagtagtagtggtagtgatagtagtagtgggagtagtaatgggattggcaatgatggttgtattagtagttgtattagtagtaccaataccattattactactgctactactgcagttactagtaccatcactactagtattactagtaccaatatttattattgcagaaagatcattgtgtgagatggagataagaccttgaatatccaaagaggcaattgagatatacagatttattataacatggtagatataattagcttggtccagatgattttctatagaatacggtaaatggtctttagggacaaaaatgtggctagttttatctttgcagtaccacttagaatttctattatatatttcggtgaaatctttatcctccttagggaaatctaagttataaaacgaaatgtttttgttgttgatggttaagtttgctggtcggttggtggtgggagtattggagaatgtttttaattttttgtgaattgagtctggattgttgacatcgttaccgatgtggtttgtgggttcgactgttctttttctcattggttattgagaacgaatataatcgatatttttttatatatataatgaacagttgactatttcagatagaaagtgattaaaggggtctgtctataagtaaatgttcttagaattaaaaaaaataaaaacaataaaaaataaagaaggatctgtataaatgaataagtatgcttgtatgtgtatgtgtgtgggtatgtgtgtgtgtgtatatatcaaatggtagtatgacagtgatagcaacctcatcgctctcgagacgtttaaaaaggaaagtttttcagtgatttcttttttcttctgtttattcccagcgatttccgaaaaacaaaattcgggaaaaaagaaaagacaaaaagttcacagataaaaacagaaacagaaacagaaataaaacaatatgaagaaaggttacaatcgaagaacaatttaatgggaaacagaatgcatggtttgaaaaatattgaaataatgtacaaaaaagtaaacgattgtttgtaaatatatatacatatggtctgtttgattcaaatttaaaggtaagacactaatattcggctaagagatcaaaatgatgttattatatatgtatatacatggatggagagagagagagagaaatataagtgtatgtgtgtttgaaaaaaatatttgtagatattattttggttatataatttctatttttagtatttttttaacatttttgtttattttagggagtttaagaggaataaataatataatttttttttttaccgaaaagatttttgtggaaacttcaggaaaaaaaaaacatttgatagagtaaagataaactcatagaacaggaccaatatgttaaatcttcataaaataggatcttatacaaagagaaattatttttcttttgaagcctttttaagttttcatcaaaacttcacagcaagctccttctatataactcagatattaagggaagtaagctaatcagaggctgttaaggtaaatacaacatcctagtttaatacattctaagggcgaatgtatactagagaaaaataagtagataacaacagaagaacatccttacccatctatactctcatagataacagtactattttcatcgttattctgaaaccttctgttctgttctttttttctttaatcttgtttgatgattatggcgcgccctctgttttcacatgcaaacccaaccctaaaaaagcattgtgtgcattcgttttctttttcttcttttttttttctcttgttggtgtttccgagtgcattccgcctttcccgcggaacttccgctcaggaatccctaatccttttcttccgtccgcctctgtctctccatccccctccccttttttctttgttttgtttttttctgttttatttatttttttattttttttattttttgggtttcccttttttcccctctttttgttttcttcttgttcttcttcgccgccgtcccccccttccccttcaatcttgacttttgctatcggttctttctgagttctttctgtgttgttgccggttgtctgcaacttctatctagtcatatatatatatacaaaaccatgatggttactgttaccagtacagaaagatatcatcaacaactgttatatctgtaactacaactacaactacatctgcaagtattacaataactattactattacgataagtaatattatttcctttttttttcgtttgtttttttgggtttttttcttttagattttattataatcttacttaaaagaaacatacacatacattctctctctatctctctctcatcacatttaacacatagcaatgcataagacttattctttaagaaactcaagagccccaacggcctctgaactacaagctccaccgccaccaccatccacaaccaagtccagattcttcggcagagcctccttagcctccactttcagaaaaaatgctgctggtaacttcggaccagaactggctcgtaagttgtcccaattgatcaaaacagaaaagggggtcttgagagccatggaagtcgtcgccaacgaaagacgtgctgctgccagacaactctctttatggggtgcagagaacgacgaagatgtctctgatgtcaccgacaaactaggtgtcctactatttgagttgggtgaactacaagaccaattcatcgacaagtacgaccaataccgtatcagtatgaaatctatcagaaacatcgaggcctctgtccagcctagccgtgatcgcaaggacaaaatcaccgacgagatcgcccatttgaaatacaaagaccccacctctacaaaaatccctgttttggaacaagaactggtgcgtgctgaagcagagtccttggtcgccgaagctcagttgtctaatatcacaagagaaaaattgaagacctcctataactatcaattcgactcaatgagggaattagctgaaaaattcgctttgattgctgggtatggaaaagccttattagagcttttagatgactcccctgtgactcctggggaggctagacccgcttacgatggttatgacgcttctagacaaattatcatggactgtgaggccgccttggaagcttggactttggatattgctgccgttaaaccaaccttgtccttccatcaaactgttgatgatgtatatgaagaattggatgatgaaatagaagaacaagaaccagaaccagaaccagaacaagaacaagaactagaagaagaaccaccactagatgaagaagatgaagaaatcattgaagatgacgtagaacaactacatccagaagaacacgagcaagatgtcgtggatgatgtggaagaacatcatcatgacgaaaataatactactaatccacaattctaaaagaaaataataataaacagaacaataaacaaatattatattctattcccttcaatccatttttaataatataaccataatcttttttttttcctgtaatcttttctattctattctatcctcttctattttattttatttacatgtataatcattacgtaatatttatctagattttgtgattctttcaaaaaaaaaaagttcgtaaactatcttttaaattcttaaatgaatattattatatcttactgtaataaactgtatgtacaaggttatatatatatatatatatatatatatattgttatcttggttttgagaattcgtcgtttaatgctttataccaattttttgagtatgataatttcttatacgatgaatgtgttatcgcaatctttttaattcgctgtaaaaatttctgtttacgtatctttgtctctgaattgctaattataaaatttgatctttttttattgttatcgccactctttgaacaacctttaactacatttaagaatcttaacatttttcttatatctggatgagtcttagtcacattccacaattgcaattcatggaactgacatccctcaaataagatggaatctaaattaaacgtttcatatagtttatccattttatttagtcttttcgatttgatctttaaagaagcaccatggttatgatgatcatgacaaggatccacatagttgaacttaattatgctttgacatttcaacttccaataactgttgggtgaatactttaaccctactctatccttgaataaaagattgatccattcataaattatcgggaaattcttgctgtacccattccttacgtggctcttcaacaaaagattgaaactcgtcaaatctccacatactcccaaattctcgttgaaccatttgtagatcatcaaacagtggtctaatttacccatattggatagtggaacaagaaacagattcaaagtttggtcattcactgaacaattggatctgtttgatctaatgaaatctaatgccatgttgaattctccattctgtaaacacgatttaattattatatttgtgatcctaacatttcttctcatagtcttggaaatagcagattttgtaatgtaatgattgatcatttctttagggaaatccttcatgatgtaaattgaactccaatcggtcacaggaacattattttgtttcataatttgtacaaattgcaaccttccaatcgacgtagtcaaaaatctcataatcaattcccaagtcttggaatcaatctcaatctcttgtcttatcatcaacttaagataaaatttcaatccaataataatatctttactcattctaatttgattatttttcaataacgatgatattaaaatattaaaagttgtcagattgggccttataaacggatgcaaattaatgaacttaaagatctctctcatcgatgcaaaatcccaatgattcttaaaataaaacaatatgtcgttatacgtgtctatcgtatgcaatggcgtggtcatattattcattggattcgccaaagttcttagaaggtgtggtaaattttggtctttaattatagtgtgatgtgttaatgtccttatatagctcgggaattcatttgggttcagttggaaattaggtagttgtggcacttctaataatagtgaagttttaaaagaggaggaaatggacgatgcacggtcactattcttatcttgccttaaccaggaatcgtttaagggcaagattgaatcgtttggcaaacttcgataattcggtgttaatttgaataaaaagggaattattcgattaataaaattctgatctaataataacgcaaactgtttgtctttcaaaatatcagtcttcaaattgtgataatttgtggctttcaaaaaatcgtattgtgagtttaagatctttaatcttttaaatttagttgaattaattaataccaattgttggttaattatctttttggtaaaattggaacccttaccaatcaaatctttattatttttgactatggcagtgatatctttcacactaacggcagtagcagcagctttagtgttctttgctttaataatagtagtaatactgaaccatcttttacataattgaatcattatatcatagtgagacgataaaggagttgaggagagatgaaggcgagaatgtatcaaatagatataatagaatgttttctttttataccgaacactatatgaaaacaagtgagtatacccttaaacaaataacaatattatgtactagacttctatctctatagcaaagcactgtgcagaatggagatcaaaaaaaaaaaaggaaaaagaacaagaaaaaaaagaggaactactataacgactaaatgccaggacaaccgacataacaacgaactaagaactcgtgattttcgttaagagaagaaactattgagttgaactttttgattatcattcatcacgcatcatcatcatccttatcatttcctttttcttcgagaaaaacggcagctttgcaaattcctcgagcatttttgttaatttttcatttttaatttttatttttttggaaagtgaaaggaagaatcggaagaaaccgaaactaaccaaaaatcctccagagcgataaaactctttttagaagaagtgagaagggaatatatgttttgatacacatttacaccaactaataacactccgttggacatgatttgtactatggttacgagggtgtaatgttactggcgttactccataaataaaagagtttattttctaaaaagctaatggtcataggattaataataaaatacatatatacacattaaatatatatataagcacaattcttccttccttcatttttattatggacaccataataacgaatggaaaaaagaaaaatggttaacgataataaaaaaattgtagtaatcgatatagttaaaaaaaaattataatatcaataataatcaataataataataataataatcataataatgattttttttttaaaaaaaaaaacaaaataaaatagatttttcaaatggtttttcttttcttcctttaaagatctgatccactctgcctttttcatttttctttttcatttttttttcttgttctatattttccatcccatgcagactgtattcctttaacttgtcatataatagaaagtaatgtaaaaaaaagattggaaggaatatagttaggttaagtgtattcatagaaggtaaaaagacaaaaaaaaatattaatatcttacaaatgtagatctgatggaaaagaaaaaaaagaaaaaacgaaagaaaagacaaaaaaaatacatcaaacttttaaagtaagacaaaataaaaaaaaaccaattaaggggatatatcaacaatgatgatagttaaaggaataaagagaaacaaacacaaaataaacaagaaacaaaactagaaataaataataatgccaacaacaacatcgacaacgacgtcaacaaattatatttaatatcaataaaaaacatgatattttgtagttattgcttgttttcatttattattatttctgtgtttctttttcgatctttggtttatttcttctttctaccacctgtttgtcttggtagactcttttgtgcaggttttagaatctggaaagaacataacaaactttcatcaactgacatcatagcaccagcattatcgaattcaccacagtagtttggtgcactaaataatgttaccaattgtctctttgaaaagaattcataaccatcttcaacaacttgatgagctctacaaattagttccatgtcttgtttttgtaaaaatctatttactacatcaggcccgaaagtaaatgaaacacctctatcattttccgaccaaccgacgatatctttatctggatctgaccataacaaatcacataataaaccgacgtcagggatatctgttggtctcataactcttctaatttgttccatactattcaaatccggtgataaaccaccatgcatacaaaaaattttttcatcaataatagcggcaataggtaaacaattgaaacaatctgtaaaagtcttccatagtttaatattataacgtcttttacattcgtcatagaacccatatattctattaatggacgcacattcatggttacctcttaagataaagaaattttccggatatttaatcttataggccaataatagacagattgtctccaaggattgcttcccacgatcgacgtagtcacctaggaataagtagtttgattcaggtgggaaaccaccgtattcaaatagtcttaatagatcatagtattgtccatggatatcaccgcatatcttaatgggggcctctaattctagtaggattggttgtttaataaatatagatcttgcctttgaacaaagatacctaatttcatgttcttctagatccacttgttggccaggtttggagcctcttacttccaataatctgtcaataatattatctacatccacagtttgagtgtccattttgaatttgtgttaattgtattgataagtgaacaatatatatatatatatattacaatgcagatctcgtataagtttttattatttactcttttttttttcccctttattctttccttctttctatatgttattattattattattattatatggttaatattttagaaagggggaagggagtgtatgtgagtatatgtatgggggaaaagatgataaaaagatagaagatattattaattaattaattaattaattaaatgttcagttaatggaatcaaagaaataggaaaaggtgatacctgtttttcttttttcccttcttctttgatttaattttattcttatcgtattattagatagggttgttgttctctttctattaaacagtcaataaataacgtagaacagtaataaaaacaaacagaacaaaacgaaataaaacaacaacaacaacgacaagagacagaagataaaaacaaatatataggtaatagtttaatgagattgacgttaggacgtatagaggaaaagtgatgatcttaagactaagaattatctttaaaaatagatataaacaaagtaaaagtaagaaaacctttaagtgtgttaaatttttcttttttgtttgtatcttcctttccttggggggaactttctttttttttttttttttttcaatccattctaagaaaataaataaatagataaataactaaattgagagggaaaaaaaaaactaagaaaaaaaaaacaaaaaaaaagaaaaataaaaaataatttaaaaccacaagactccgcaaaaccacgtgatgttggtgtatgggtgttctacacattagaccaaaatatatacaatgcacacatatgttcactaagctacagataaactaattgcggtagaatttaagatgtatatttctaatatatatgccattttcctttttgctgtcttttttaagacatgttcactgaattacgcaaaaaaataacactaccgatttgttcctataaagccatccgatgcacccacggtctgtgttatatttcctagtactcgtggcgcagtggctttttgtatgtgacgtcccttcttctcttccgcaacctcttacgggagacatccggtaggtggatgggcgtgccaggcgttcgagcccggtctgcgccgttgttgccgcctcttttattttctctccttcgcagcgagaaagagaaagagagggaaaaaactctgcgacaccaaacgaacggcgaagagaagcttttcgacgtgaaatgatgaacgaaactttagtgtgaacaatctctgaaggctccccgactttgccgttgggttgtcataaggattaaaaacatgttgccttccttctgacatgacatctcttcgctgttgttgggggcaatgtttgttatgttttttcttttttttgtttttgttttttttgttttagctgtactgatctatgtaacgaatgtgtgaagtatatatgatagagaaggtattactatctatagatcgaaggtgtgagagatctactggatagggtctttttgctttgccaatcttcataattattattattattattatctctcttttaactcagagtagcagctagttgttgcatttatttattttatatatatctgtctataatggatcctttttcctttttccttttttttttctcattcttattctgcttgctgttttattgactatatatgtctattatgacaataacataaaaataactaaataatcaaataaataaataaatagatagataaataaataaatacgtatgcttactggaggcatactgtaattgtgtttataatctcaaatggatccagagagaaacaaaaaaataaaagtaaaaaataagataaaaacttccagtactttattctatcagattctaataacgaagccacaatagtcggtctattattatttcattgcagattactgaaataatattctagaaatgcaattattaaggccttcttccagcgtatgctataagttgaaactaccacaagtagatactatcacatctaatactttaataaatgacgtagataaaaagttgttgactttaaattatagaaccggtgctgctactcatctgtctagatcaaatgtttttgttcatggtggtattattatcccattaaatctatccgatatcactaccaaatctattcaggaggaactaatgctatatttcgctaaacaaatcaattcttcttcttcttcttctaccactaccaataccaatactattaataataataatagtactttcagttactcattagatgatccaattttgtctacaaattttgatactctctatgattggattagtccaaatcttttcactttagatctaatcacaaggaaatggtcgcatttcgacactttttatccagaagattcgaatacactgaaaagattgttccattcgattgtgcttcatgatgataaactatacctattcggtggtcttatcgtgtctccaactaatggctacgaactgatcgcatcaaatgaactatgggaactagacctaactaccagaaattggaaactgcatgacatcaacccagacctcactagacgttacaaccattccatgatggtccatgtggactcaacagatacaccaagactcattattgtcggcgggaaagataatttagatcacaatatcgttcttgttgatatttttaacataagcaccggtgtttgggagtccttggattgctataaatctaaaggtcaaagaatcgtgactaacattaatggagtacctaacgggataaccaaatcaaataatgtccctgtgttgatagataaagatatcgttcgccaaaataacccaaatgaaacttctctggatgggaaccctcacatcaacaccaaccctaacacgagtaatagtaatggtggtaacaacactggtatagatcagaataataaaaacgttatcgcttctactttagctacactcaagaataacgataattctacacaaaatgattgttcatcggatcagaatatagtgtctgatatcccaataattgtctactacaatagaaatgagagtaataacaactcaatctgtgatcaaatgccaaatgaaggagaaataccgtctccaattgtagcattatcattattaccaaattctcaaggtttaagaatgaattcatttcaagataaagaaaccttaatgataccgttgaatctaaaaaacttatcaatatcatcatataaaaagggactcattttaacagggttttatcctacaacaaatagctcagattttcattgctatctttatgacctatcgtgtgcattctggacaaaagtagctattgattgtcctgatagtgatattaaccatcatagatttaatgaactatttgtttggaagtctcatcatagagcaattgtgttaggtacagagatcgatgatcattatggtccaactgtacaaagatttgattatttattatctttcagattagcaatgatgaacgtcttaaaagaggttcccagatatatactggatcatgataagggagaaatggttcctttaattccagaattggatagggaatcaccaatattgagaagaaacaaatccagtaatactttatcaaataacagcccatcaaacaatatatcacaatttgaaaattacattaaatacataaccacacctttagaactagagtctactagttctgtgtttccaccttatgcattagtccttgggaaggattcaatggaagtctttgggcaatctatttctgattttgaatttatatcgtctaatggagaatctatttctgtgccaatgtatcttttaaggaaaagatggggcagatattttgatatgttgttagccagagcatattcacaagtacataaaaagcaaaacccacaagataaaaaaaaatcgtcttcccaaaaaaatacaatcaaccattcaaatatcacaaaaaaaaaatcaccggcatcattcaatttaaatacaaggaaaaatgactcaccatcttctcacaatagtgatggaaaattatcaccttcatcgtcaatccccaatttattgaattcaaaatatttaactactgataaaaataattctaatctattgaaccatcagcatgctacaagatcgaataatatgacagatattcctatatttcgagttccattccaagattcccaccaaactaacacacatattaaagatactaaatctctgaagaaaaatagcactttgaatgtaattcattccagtaaaccacaccaaaggagatcatcttctgttttgggttcaataacacatttaagaaatactgctggaattgaatttgaaagacgtgcttctcatccaatagactttgactcttctcttaccagcaatgtagttgataagatcaacatgtcttgcacaagtcatacaagtagaagatcatcacttcgaaatcttccaaatccgcaatgttcgagaagaccatcgactatgtcacaaaatacttctggtcgtgcatcaacactatctttagtaagttcgtcatcagacagaagaggagccaatgttaattctttaactagtcgtcatgatagtataggaaacaattctgaaagctcctataattcagtaacttatgaattaatcaatgtttcaataccgtctggatcaatcccaccaatgatttctctccctcctacacctacagggtcagttagtagtgtttcctcttctcatttacaaagacataataataataataataatgtctctaatttgttgaactcgatagatcatacaaggcctccaaaaaccagacagaattctcttgaattttatgcttctccaagacacgtttcgatatcttctagacgttcatcatatgagtcaagattacagtctatgaaatcggcaagcagtgccagtttctctgaaacaataaatgatcaaagcataattgaagaaggtttgtttccatcatcaagaccctccactttttcgcctgcagtatcatcatcaccatctacatcttcttcattctctgttgctgcatcgtcacatggctcaatatcatcctctaaatcttttctatcattgaatactgatgagtttacatctcataatccaatattggatcaatttgatttagatcctttattaatccccagatcactatatatgccatggtcaactaaaacagtaaaagcattcactgaattcttctatacgggaaaagttaatggtcagtgggatttagcacccacagtgttagatctattaatcatgtcatatttatatgaagtccccttattatatgatatgataactgaagtgttatatatgttggttggtaaaaaagaggaaacattaaaattaacaacaaagaatatgataaatggatatatggatatgatgcaaatattccataataatgaagatatagagggagttgaatcttcattagcggcgaatgaaaattatcagaacttattacaattgaaagaatcacttgataatattaataatgggtttgtagacaagcatatcttagaaaaatacattttaaataagcatgagagtagaaaaattagtattgttgataatgtattaaatggatatagtagtgtttatcagtcagatatcttgtctatgggtaaaagaaggagaaagactgcaacaggagatagtactgataaagaaatgccaaatattggtatagtctattctggagggccaagagatagtcaagactctctaggttccttgctgtatctccgtcacaaatctattattaatccaagacggaaaaaatctagtttgagtaaagaattaaattttgatattttaaacagtgatgataatacaaatatcattaataaacaagaagaatatatagcggagccacaagatgatttgaatgatcttagcgaaaaattgaaggactttaagatccgtgggaagagtgtctctaaggagaagaatcttgatgaacaagtacttaaaccatcactttcttctccttgttcatcgtcatcagtctccagtgattcagaaaatgagggtgaagatgcgtattcaattggttcaatatcgtctagaaagataagaagagaattaaagttagaagaagaactcgatgaatccattgatcccttattgaaattaggtaatactgaaactagcaataatctattaaaaaattctattttgaatcaacgtaatcttcatggaaatcgtgatggatccattacatctacatcatctcctcttagattgaacaattttgatggacctgtccagggcgatcctaagagtaagaattctaaagtccatggatttgatacaattgcggataaatttgaagaagttcaggatgtaacattggagaatttagtatcaacttcagaaaaatcgataatatcgattgtggattacatcataaaattgatctatcgtacttcagtaatggttaatgatacacggttgatgatacgttgtatggattgcattgaattttccaatattctaaaaaaaataaaaatcaatatgataaaagattataataaattgagtccagtgaggaaaaacacatctatcaaggtaagttctttatcaccggttgtatctcctctaaatatgaattattctatttctaaaggagtagaacgccaatctagtattcatctattaaatacagaggaagtttctactactctctcacagaaagtgacttctcagaacttactttttgaagaaaataatgctgagaaggattcaaagggtactacgacttcaattatcagtggtactaatactactactagcaccaccaccaccactagtagcaatcataatcgtagtatgaaggattttccagaagataaaagggaaacatcattaccattgccatcaatgtctcttactggttctctaacgtttccattttttggcaaaaaacgatcctaaagaaataatatcacatcataaactgcgtgtacgtatattctttcatataaatagatagatgttttataaactatatatatgtaatgtattttaattgaagtacaattgtatatctttcagttaagcttattattcaaccaaaaagaaagaacgagaaatgggcggcgcggggggagtctggtcaagaaccatagaaatgcaataatctgcagttatatattccataataacttaaatatttatgaagttattatcatcattattattatgtgtatacacatgcttaacatcttggttatctataatttttaaaatatattcaaattagaagaaaaaataaaacatataaaaataaactaaaataagatatattattataatatgctatttaaaattgaatatacttataaagccttcttagcggcatcagctggagaaactttattatctctgttaaatcttggtctttgtggaggagttctgattcttctgtcagatctagatctaactctaacaattctagcatggatagcacaagagacacagtagtgtaatttgttgtaggtctttggtaaagcgtattcagcgtaaacagaggcttcggaaagatctctgatggcagcagattcaacaatgtttctgatagccattctcttgatagccttatcctttggaacggatttggaacagttaacacatctaactggcttaacgtgacctctacccttcttgtttctaccgttggaagctctcttctttggcatttttagactgcataaataatgaatgaaataaacaaataaatgacaacgtgatgatatttaatgtcagttatgcaattttatttttgcatgtttgttagtaaaagagaaatgatgaaacaatctattaagatgtatttaccatacatttaagaaggtttgaaaaggatacagagaagggctataaaagtaaaacaaaaaaatggttataatatctatatttataatatatttccattggaaaacaacccatcgcaagccttttcttgatactttcttatactaaacacaaaaaaaaaaaaacatctcaaatccatggattatctgtttgatagtgataacctactgtaaagccaataacttgtaaaaattaagttaaaaaaccaacaattctattggtatagattatactctacaacagttttgattcattaataaactcatgatccttcttaaaatcttcttttatcatatcacgataacacatactatttgctataataaagttctacggtctctttttggctcttgagggaacaagtcttaaaataataaacaagagatgatattaataaatattagacaacaaaatatagattaacaatagtaaatagtactatgttaaggttgtgcaatactaaacattgaaaactatgttttcctctactcatgtgtctactacttccatcttttccccctcctccctctctgcctctcttcctgcacacggcctttgccttcaccttagcgagtttctgacttctcttccacgaagctaggccggggcctgtgggggaagacactatactgttcttggtgccgctgattactgaggaaatggcctagggagcttccctgttggtggtgggcggggacaactgtgagaaagtagaacgacgaactgaggaagtgtttgttcttccccttcccaagatctggttgtctcgacactgttgttgcgccttcttgctatgggacaaacacctaaacaaacggtggaggagatggcatcatccctcacatttcctttcgttcatcacactagaggaaggaaagggggagggtgagaaaagaagagcaaacacttccccagcccacagtgagagagaagtattatgtttcccctgtggtgaggtgaagagagagcatcacgtagtctctcgctgtggtttaactaatctgtaagtagtagagggccttttctcactaaggagaagggatggagaaggtgggaaaaaaaacctcctacttccgtaacatgacagggcgttgtcaaaaatagtgaaaaacaaaaaaaaaaaagtttgtattaaataggaaatatataaatgtaaagaaaaattttcaacacctcttgctgatgtgtgggtttatacattttatgcagtcttgagtatagattgaaattgctttgataaacccggttgagttatcgtggctggggttatacaagttctactttgacgtgtgctttatcgattaaaatatcttttctccgtaatccaacaacttcatatacataaccaacaactttagggatttttaattgcaaagtattcttaataatagtaataataacactgaaaataacactacataatatatagaaccaaaagaaaaaaaaaaaacagataacaaagaaaaaaaaatggattatcggacaatactacaggacagattacatggaagtccacactataaccaatgttcagattgtcattctagaaaccctacatggtgttccatgacctaccatgtcttcttatgtacaagatgtgcaacattacataaacaactattaaataaggacccttatgtgtcacgaattaaatcaatcacattagatcattggcctccagatgaacttgaaacattttgtaacgacagaaatccaatagttaagactcaaatgaattgcacaactaataatgtcttcgatttacaagacttaataaacaggaagtacattcaacctatgttgtcgaatggtaaaaataatagggctggttccatgaaaatctccggtcgaagaagagcacaagactatgaattaagtaagtttgctacccaaatcagacaaattcaaaatcagtcgtcaacctttttcacaatagacaacatcgtggaagctctgctgatatctagaggcaacgttgcttcagcatatgatcttttgcaagattttgatagttataatcataataataatcaagctaatagaagggataatataacgcctccagaacttccaaaaagaccaaataatgaaattaaaccagctatatttgacggcactaacatcatatcgagtcaatacaccaacaatagtagcaataacaatagtagtacctccattaatgctcctaggcctgcaatcttcgatgggactgtggacttaactcaacctaacatatatcaacaaggaattattcaaccagcaattaatcaagtacccgcaatgatgacacaacctactgtatatcagcaaaatataccacaacctctacctgtgaattatgtcccaaatactacttctactactgctcaacaacaatacgtctatccttcaaattatgtgatacctcaatattatcctatgcagcaacaatgaagggtgtaaatgactgatacatagatagacgttactaagtaaaaggatataagatagacatttcattatattattcttcgtttattcattaatctataaatatataaatatatatactttaatatttgcatcaaaaaaaaaagaaaaagtcattaatctttataaaagattggctagaacacaaacctattttggtttagtggtgatagaatccctaaagaatatctctaagtatctttttctatttggctgttttcttgcagttttatatatcttgagatgtttgatagttggttgcaaacccatttccctggaaccgtgacatatcaaacgagaccacactacccactctttctggatcaactgcaaactcaaacggtaatgaatctgtagaatttgtaccctcgatagggtgatatatgttggatgataatgaggacgaagaagaagagaatgaggaagacgatgatgacgagtatgatgatgatgacaaggaggatgaagaagaggaacatgtggattgaaaactcccactttcatgtgaatcagaatcagatccattcaatgcatctataaaattaccacgttgaattcttcgtaaaggaggtatcaatggattatattgattaatcatatgtaaattgctatttgattgtttcatattatccctaggtaaatttttgccattagattgattgttcacattattgccattgtcattattattattagtgatggtgcatttgaccgcatctttatctttggaattggaaaaaattatattgttattcgatttattttcattctttttatttctatttttatctttactagtagctactctagattttatatttttcacattccttctactgttcttagtctctaatcgaggagttggcgttctgattgttggcttagtaaaatttgtttgactcatattattattgttattactgattacatcgccactattattagtatttgtcccatataatttgttatgcgatactagaaatgatccaaaaccattggatgatgagaaggatggatttctagtattaaaataacttgaagatggatttgaaccatcaaaattgaccaaagaaggagattgcaaacccactttattcaatgcataattatcaatgtaaaatgaatctaaagatgcaaaagaggagttaataggaagattgataacattattatattcctgaatctctaagtcattatcattgttattactcaataacggattgttttgcaatttgtcattaccatcactatgtgctgcatatagattattgctcgtcatataattattattgccacagacattttttttagttaaaattgggcgagtcagcatttgtttatcatttttgctgaatccctcactttcactagattgaattgattctaatgatagttgttgagttaatgtggttagaatatcatgctctccaatatcactcatgatagaaccttcacttaacaataaactcaattcgctattatttttcctaaattttttacctggattaatctcattaactgacgctatattgctattattattgttattcttgatataattctttgaatttaaaaatgaatcctttatttttttaccaatacctgacaccgcatattttaattcgtgtcttgtaatagaaataggtttacatgatttcttatggttctgttcaaattctttcttatcatgtaaaatatgttttatctcacttggattatatttgggcatatgattaaaatcccagcatatgaagctatgagtctttatatctgctactggaattctttttgcagggtttttctctaataaacgattcaataagtcaatgcacgaatcatattcctgttcgcacgagacatttgatacattattggaatttaattcattgaatgatggatacattactttatcattgacaatcttttcgaataattctagttcataattagacacaaacggtaacttcccaaataataagcaatacaacgttacacctagtgcccaaatatcaatcattagagagatacatgacccattaaacaattcagttctattcacattatatcttgtaaacacttcttcgcctaaacatatctctggagcaaaaaaagccggtgttcctgctgtttttgccagttctaattcatcaacactgctggtgatagtaatagtgtcactattattattatcaggaagggtggattgggtatctaaactattattattgctacaatgtttcataatatttgtggaggccaatgagacaccaaaatcagatatttttaccgttccatcttctgatattaaaagatttgcaggttttatatctctatggataattccttgataatgtaaatattctaggcctagtacaactcctctaataatctctctcgttctctggaaacttaaaatggggggaccctttgcatccatctctaaacaattactatcatcataccatttgacttcacctctcgaacaatactccagcaccaaatatattttccttgatttcaaatcgtccaacacttcaatcaatttcacaacatgtggatgatgtaactttttcattatagctatctctcttttaattttatcattctcaataatttttttaaaaaaagttctgtggaatttgtttctttcatgcctgttgactatcttaatagctacgaattcatttgtgtttaaatcctttgccaatttaactttcccatgttgaccttgccccagttctcttataatttcatatgtatttagcaccttgcgtttggatacaggatcatatgtcaaagatattttgttcgtttctttaactttagatttccaatcatttccatggtgagagataagcacttggtgcattggatggttcagttgacttattctttgcctatccaataatagattaagtgaatctgtagatgaattggtagaaagtaatgatactcgccctgatgaccttgtcttagccaaatattggttagttttcccttgttggttgtccctagatttaattttacttatatcggtaccatcagaaataaaattgtgttgtggtataagagatggataagattcatgtgtattctttgtattcatgttttggtccattatgctattaatattagtattagtattcctataatatgcattattgttttcatcactactattttcatgcacggcaggcggtaaattatgtgattccgttccacatattgccatgttcaacttgtgttgtaaatctaatgggacatctacctcttcaaaagtgtcattactgttgctatgactatacatatttatccaatccctcgattaatagttcttgaacaagcagacaagtatatatatgtatataaataaataacagtactggtgtaattaggaattctctcttttttttgtttcttcggttgtgattatttaataaaaatagtgagtatacatatacgtgtaaatattataattctcctgtgttacctttaagtttaacaatacacatacacgctcactctttttgttagctagctttatttatttttgatcctctctctaagaaaaccccaccgtgtcaaaattgtttaaaccaaataaataattataaatataacaagtgtatacaggtataggcaacgggtagtgagtatacacacaaaatacactcgttatgtctctctaatattcaattatgtgaatcaatcaattgattctatcaaaaaaatcacacataataagttttttctatctttaaggtattttttttcttttttgttttgtttttgtttttgtttttgtttttgtttcctgtagaaagtttaaaaacaaagatcaattttagttgtagaaagtttctcttcttgtgtgagtttaagaagagtgaacacagaagagttctcatcaagtgagttgaatcatgaagattaattgggggttgtggatgtggatagctcaacagtggttctatttgagcgctaagtagacgattaataatttgtaatcttacttgacattagaatcccttctatttaaagaactgacgagaagttgtcctgataaaagtgacatagaactctgtttaaaatagataagatgcatatatacactgttctttgatttctgtcctttttatatgtttctgtgaagcctgtaaccttcatgtatgattatgaatgtgaatgtagtaaataaataacttactcaagactacttttaggagctgttgggaaattgaattttgatattaattcagagggatctgtattgctatagtttgcagcttcccttttcatcaattcttcttgcttcttgagttgatgtaatctacgtttttgatctctatgaaattgtagtctatgttgaaacattttatcactaagtttaaaacgtttattttgcttttgtaacatagtcattgtctctaatgctgtgtcatatttcaattgcaattcttttcttactaattcaggagtagcatcagctttactagtactattaccagtgttattatctttaatttcttcatcaatcgtatctttgtctttattcttattcttttctacttccctttttttattgaaaatagtggttatccaaccatcccaagacttcgactgttcatctttactatttagctgactcaatctttcttgacaacacctcaattcttcaacagctttgtaatattcatctgaatgtaatgggacaacaaactgtggattatcgtccaagtggatatcacatgaatatatccaatcaggtccggatttattgaacaacaccgttgatgtcaatttatgacatatcaaacataattgtatatctttatctgctactttccttctaatatattcgttattcattaatatggttgtttcttacttattttccagaattatgaccgtggcttgttaacaaaagattggatatatatatgtatatatgtatacgtatgtacgtacgtgtagttatacgtatacatttctatagacaactgagaaagaaatgagtaacagatggatatgatggggctggttaggtggaactggaactaggttgtttttgtatgatggtgtttattttattgatttatttttctttattcctctaagcattttcttgattctatagtatggaaactaaaagatgtttactggaaataaacaaatttgcaagttagatatattcgagatgtggagtattaaattgcagaatctggtcatatatatatatatataacatatacaattgtgttcatatatatatatatatatatatatatgtgtgtgtgtgtgtatgtgagtaattctgagtctttcttttattacaatctttttttagctctttcccaagctgttttagatcttttattcccacgtcttgatgtactgtcctccaactttctctttgagttaaatataccaaagtcttcaccacctataatgttggctcttgctgcatgttctctttgcttcatcctctttctttctgctttgttcatacctagataattaatacgtgtgaaattttcttcttcatactccgttacacgacgttctctctctgtatctcttaacgacttgatcccaccacgtccgtgatctacaatattggcaccaacagatgattcccaatctggttgttccgactgatctcttaaatattcatcaatagcttgcatacgcgatctattactatgatccttatggtctttagcattaaatttatcttcaaaatgttgggatatgtgtgctgttggtggtaacatggcactaatctttggtggtctatagataccatcttttttaggttgtttattattctcattattttcttcttcttctccactttcatgtcctctacctttatctttacggattgatttgcttttaataacattgggacggtatgacatttcctcttcttcttcatcgctactatcactgtcactactgctactcttgctatcatcgctgttgttttcctcgtcactatgagacctatcatcatggtctattctagataatttctctgttgcacgtctttctgcgtccatatattccttttccattcttctgtaagctctaattaatttatctaactgataagacaatttcttttccaaaggcttcacaccacgttctaacacaacacggttctcaatagctaactgacggcccttatcaccagttggatccctacaatctggatccatcttatcatgggcaatcattaacaatgactgcacataagataatatggcaccattcttcaacgatagtaaagataccctttcttttgaagatgatgaagccttgtccttggagtcaaagaaggattcaaatccattggatttatcctcttgtccttctccatataagttctccagttttgatactgattctaatgttgtctttagtgatccattgatggattctaaaatagcctgtaaacttgacatatttcttgcttctttttgcggttgtttctgattattttcaccccagacaggcttaattattatcctaataataaaatgtcacacttttgagtgttatatattcttctactggtactatccctcttcaaacccgctttagtctcaaatatatcatatttctcagttcatctcatctcatctcatctcatcttattttatttgaatatactgtaaaaaatttttttttatttttcaaaattttcatttcttccaacaacaacaaaaaaaaaagaaataaaaaaccataaaagaatagagagactgagtaagccttgaaaagttttgaagctcatcgcaagtgttgtgtgtgtgtagttttgatgaaacagtctcttttagttagtatagttggtgagtgttagtttgagttgatttatcgtgcctcttattttaatattcttgcatatacattaaaatagaaagataaagataaccaagatatcaagcatcaaataatatcaatttcgtcatgcctcaaaacgaatatattgaacaacatgttaaacagcatggtagaagattggattatgaagaaagaaagagaaagaaagaagcaagagaggtgcataaaattgcttatcaagcacaaaaattaactggttggagaggtaaacaatttgctaagaagagatatgctgaaaaggtggctatgaagaaacgtattagggcgcatgagcaaagtaaggtcaaagggggatccaaaccattggatgaaaatggggatgccttgccaacatatttattggacagagaacaaactaatactgctaaggctatatcgtcttctatcaaacagaaaagattggagaaagctgacaaattctctgtgccattaccaaaagttagaggtatcagtgaggaagaaatgtttaaagtggttaagacaggtaaatctaaatctaagtcatggaaaagaatgatcacaaaacatacttttgttggtgaggggttcactagaagaccagtaaaaacagaaagaatcatcaggcctactgctttgagacaaaagaaggctaatgtaacacatccagaattgggtgtcacagtgtttttgccaatattaagtgtcaagaagaatccacaatcaccaatgtatacacagttaggtgtcttaactaaaggtaccatcattgaagtcaatgtgtctgaattgggtatggttacatctggtggtaaagtcgtctggggtaaatatgcacaaattactaatgagccagacagagatggttgtgtcaatgcagttcttcttgtatgaatgattgtggtatgatctaaatattatctatatcattttcctatttttgttttggttatttctttcttaaaatttcccttcctttatcgtcaatctctgttattattcatattaattcagattcattagattttccttaataaatccttactcttttccttttgatatattttctcgtgtggataaacacgtatatttaattatattttatatcaaagtgataatacaaacatcattaatgaacattagaatatatctacttacatactaattcatacatactctttgtgtacaataaaacatcatacgtcaaaatcatagaaaaaaagatattcagaacatctgtgtcgtaataaatcataatacttatgatagaaatatataatttcatatgtatataataatactaataataaatacattaacaggatatagaataacggtagaaagtgggacaaggtataaatagatagagaataatggtggtagtgaaggaataaaacaataataataaaaaaaaatggtaaatataagaactagcaaaaaaatagaaatcaaaaaggaaagaagcttatggagaattcattattatttcacttttgaaatctttctttttttcttttacctccattagattgatggtaagtatggtaatagacatgagggcattaaaaggtaaaggtgaagaagaagaaaaattaatcattcaaaaatacgtaaacaaaatatatttattgatcttagttatcttaatagaacattaacattattattggcatttcatttaaatgtacaaattattttatattttttttattcactcttgaccaaaaccaatagtttcttcaacagctaatgtcaatttttgttttaagctatcataatcagtatatggaggtaagtcgactctattgaagcaagtgtgtgatttaggtaattgttggcattcccctgctttttcaatagtaaatctccttggaccatcagaaccttgcaagtccttaaatccattgaccggtattcttgatgtaccggtggtgaactgtaacaatcttgctctttgttcgttatcccattcactgacacatttccagaaccactgaataacttcatcagactcttgatagccacggtaatctgtgtgttttttccaatcctcgatatcgatttctgcaataccaccaattagtaattccaattctctttcatcgaaaactgtcactaaatcttcaggaatcaattcattaaaaccatccataaaggctttaaactgttcctgaactctatcaacgattctccattgagtgtatttttctacatattcctttttgttttcatcagtgacctcgatgtctctaccatccggtattaaatccacagtaactacctcaccgaacctttcatcatctgcactaaacgttagatctaaaacgccgtctatttggttgtctaaggtccattttaacgaattgtaaacatctgcatcaacaccctccatatcttgtaatacaacttttttcctaagcatcattttatatagggcaccgacaaagaatgcatctaagaatcttctgtggaaaacaccaagacctacaactctaccgataaatttgaaataatttaaatgttcagggttaataccactatttggatttatctggatggtgtaattgtcatgggcactatattcaaatagacaatagaatgggttaaacatttcgtgtgataataagaagaagaattctctagagacaccaccataatccaaaccttcttcaccgtcgaatttgatcattaatcttttctttaaatcttccggtgtttgtctcataatttcttggtatgcatcttcgaatatattctttctacgtactttaatatgacattggccaggtaagattcttaatgctggttgtgacctgaaataaatgactttacgtctaaaatcacgtttgtattgtggcacattttgatcaagggaggaaggcaatcttggatcatcccatgttgtggtctttgtgttgtggtccacgaaatagacacgtgcagtattagttaatctcatttcccaaccagatggtaatggacctaattgggatacaggttgttgttgaatggttgtgtttgttggaccataggtacggatatactgctgtcttcttgggtccacccaagtggtggttcttgtattgtgatctacaaaataggccctaccttcaggggtaaatctttgttcccacccggatggtaattcacctaacccggatgtggtagcaccagtagctgcaaatgcagcagctactgcgccattgactgcaggcgtgttattattgttaccagtgacttgtacggagatggaactattttcgctcgagtttgcaccattagcattacctggaagtgttctgcctctatgctgtcttctttctaactcagtgtttgcattcaactgattattacgttcaagttcattttgatctgtggttggacgtttccaagtggtagttcttgtattatgatccacataataggtacgaccgaaattgtcggttcttctttcccaacctggtggcaatcttccatattgatcttcgaaggaggaatattgtctactagcgtgatcatgcatattgttattattattactattattattattgttgttattattagtggttgttgatgttgtcgatgaggttcctgctgtcgctgttgtggctgctgctgccgtagaaccactttgtaatgtagattcaacagcctgtgcagtagttcttctttgagttgaagaagaagtagaatttgaagcattagaagcagtgacatttgcggatgcagaagaacgtgaattcgattgtgctgcaattgttgttgttgatgatgatgatggcagtttagataagacaacaattaatctaccgctaacattcataccatcattagatcttttcaaatctctggtgatagtctcttctcttattctattattattgttgttgttgttattggatattgaatcttcgtccaaatgaccgagcacatcaccaatgcgaatattgactacaccaaggaacccttgatcctttttcttaaattttttctggtcgaagacttgaatggttaggattgagttttcatttatgtcgttgaacttgaaagtttcattccaatatggattcaatgttttcttggcagctgaggttgatttggtttggtatccgtcgatagtcaagacagcgaagggatcaggagatctgaagacatctcttttataaagagattcagcagccactaatttgactgatatagaagcaggcatagtaaaatatgaagtagaccagtatatatgctaaagaggagggagcgagggagtgagagagagatatatatatatatatagaaagaggaaaaaaagagattaagaaatatttatatataaataaaacacaaacacaaacacgcactcacgctcacaacaaaaaatggatgggacaaaaacagatgaattaagtttgaatatccagatatgtttctttatggatgagataaaccgttcctcttaacttatatatatatatatatatatatatctttttttttgtttctttcttgtatgttctgattgtaatgtttataggattagttccacttgacttggtattaaagattaaatcagaacccagacaaaaaaatacttttccagacagtaggtgtaaatattaaattgctgttactgttgctgttgttcttgctatagatagttagttagtcagttgctatgtttggatctaagaaccaaaactaaagagtctacaaagcccttttccttccgtttcacacttcaatttttttttttatttcattttatttttcatttttcactttcacctcgaatgtgtgaaattcacgtttgttttaacctcctgtttaatttttatttcactttgttttcctccccttttctttttttttcccgcttgccgagagaaatttttcattttcattttcattttttccttcccaaaaaaaaaatgaaaaatgaaaaatgaaaagaaccgcggaaaaagaagtccgacggaaaagtggcaagacctaaaacaaaaaataaaactcctctttttcctgctacaaacaggtgttgtgccctaactgatatgtggaattctatggggaaacttggaaattgtgcgcgtgcaaccctaagtaacaggtcaaaggactacgaaaaaaacaaaaaggaaaaggaaaggggaaagaaaaaaaaatgtttgtgtttaaaagtttggttctatcgccagtctttttatatatatatatatatatatattggatattatcaatattttgtatatatacatatctaatagcatttctaacaatgtttctactagttggatatgcatattttgtatttttgtatatcatactaatttccaaaacaacataacagtaaattacaacaatgtcttctattttcatttatccttgtaaagtcgtcgtcattgttattattattattatcattattactatcgctatcatcatttgttacatagtaattatcactatcatatctttgattatttagtggatgattacttctgtagttgttgcctttcttgaataaaatatcatttggggattcaatcgaattataatttctattagaagaattggttattattctttgttgttgtttactattcttactatttctactagttccactattattattattattattattattattattattgttgttgttgttgttgttgttgttgttgcttatcatcttacttggtgtatcttgaatatatgaagctgatttgtatttattattatacaagctatcaatattaggattagggttaagattatgactatggttatgactatgattatagttattgctggaactaattatgtttgaatccgttggtgtgggcgtagaagtacaattattgtttttatacatgtttgtgctcttatttatcacagttctgtcatatggtgagttcgatcctttcctactatccatattgaatcttgccttgtttgtatttgtgtttctgggcgttgggtttccatatccatgtagatttgttcttttattgactctaatatcccacccctttccatcattcaactccatccaatcataatggccatcatcaactattttattctcaaccatgacctcatcaattaaaccaatcaaatactcataatccggctcttcattgaatttcaatcctctggaatacgacaaaaacatagcaaactgtcttggtatcaaatcgttcatcaacaactcattcggtggaatcttctgtttggtatgaccgatcttttcgtacttcaatttgctgttcggcgctttcaacccttgccagggcaacgaacctcttaagaaatagaaaagtacatggccaatcgactctaaatcgtctctacgcgattgttctttgccaaaatgcgtgtttatcgacatgtatcgggctgtaccactcaacgatttcttctctctatatggtatatgatgttttgttctcgggtctctatactgtttcgccataccaaaatcaaccatgtagatcaggttgggatcgtcgtgcgcattcttggtaatgcacttgttctccttgctgaccaattggtactgcgatatcaagaaattatcaggcttaatgtctctatagatcaaatcatgtttgtggatctctctgattctctggatcatctgcttcgcaatcaaacatgtggtcttcactgagaacttgcgtccacaccattcaaatagatcttctaatgagggtcctaacaagtcaatgaccagaacattgtgcatcccctcctggccgtagtagtatgcgtgtgggatccccaaacacccattcagaatccggtacgccctgaattcgtctctcagctgcggtgtctcagagttacgtggctcgaattttatagcaactggctccttatggttttcattcaggatgttttcaccttcaaagattacaccaaaggatccctcgcctatcttgtttcccaaaacgtagtggattcctactatatgtttttgatgattcgatctacgaacagacgacagcatatcacttatctgactatttaatatctttttgtttttttttgtctttgtaatgttttattcttgttttctgcgttttagatacgtctctatttgtatggttgttgctattaatcaaatactagtttgagattttagttagattttaagctcttcttacctaaccatacacactgacaactcaaattctcaactgaatgcttcctttctacttctatctcgccaatctacatgctcttcattctattgatagtctctttttagcctcttcttttggtctcacagatgaatttgaagatgggaataattttttttttttagtggaatggagggaaaaaaatacagttgttgtaaacatttaagtgcttgaaactttttagaattgcatgagggagaaggaatgaaaagagaaagagaaagagtgtgtgtgtgcgtttgtatgtgcattgtttaggcgagtgtactggtctagggaaatcacaaaatatagatatagtcatagaaagagaggggaagaaattatgggttcagaaaccaaaaatacgagttcggtgaataatgagaagatcaatttgaaccagtttgttgttggtgggaaatgtcttgcattccatggtccattgctttatgaagctaaaattttacgtatttggaatccaactggacataaattaatactggataataataataataataataataataataataataataataatagtagtagtagtagtagtagtagtagtagtagtagcaatagtggcagtagcaatagcaatagtaataacagcagtagtggtagtggtagtggtagtagtaatagttcaagtaaacgacacgatcaaagtgatttatatcctccagaagatctacgggatcaatataatttcttcattcattaccaaggctggaaagctacgtgggatgaatggattggtgtagagagaattagagagtataatgaggaaaacattgaattgaagaaacggttgattcaagaggtcaaagataatcaaagatccaaaaatcaaaatgatcataatagtagtagcagtaccagtagtaaaaagaggaagaatggcagtgattcaaatttaagtaataaaaattcagaaagtaataataataatagtagtagtggtagtggcaacaataaacgaaggaatgttgaatctggatctgggatttctactgcttcttcttcttcttcttccactagtaaaaaaaattcatcgtcatcacataatggatttaacaataagcatgataggaatggtaattcaaatatcaagcaagatgccaataatagtagtaatagtaagagaaattacaccaatgctaataacaataataataataatacttcattatctccaaattcttatcatgacgattcaaatcactggaattatggtccatccaggttggtattgcatatacctatcaagttaaaggcgaaattggtggatgattgggaactcataacaaaagataaaagaatattgacgcttccttctaaaatgacagtcaaccaaatgttatctatttataagaaacaggctatgaaaaatatgacgttggtggaacaatgtcaattaaatgagtttctatcaggcttaatagattattttgaatgttctctatcgagattactgctgtatagattagaaaggctacaatacgagactctgttgaagcagtacaaggaaaggaacgaaaggatgatcaaatctgatatatatggaccattgcatctgttaagattgatcaccattttgcccgaattgatctcggctaccacaatggatttgcaaagttgtcaattgataataaaacaatgtgagaggctatcgatttggatgactattcatattgattctgtgtttcccaccttgaatcctcgtgaagacagcagggttttgttgaataacgaggaaggttatgataatacatcaagtcagtatgaaggagtggcattaggattatagataaaaataatcatatatatatatatatatatatatatatataaatctagatacttctatctttttgtttgtttagttgttactctcatgtttagtactctcatatatacctatatacgatacttgatggtttacagttttataataaacgattcaaaattgtttcttatctgttccacagaaaatagaagggtctcagatcaatatatatgtatatacacatatatatatatagaacaagtatgtatgtagcattgatttctggcaaagtactaacgagagatcaacagtaacagtaagaagtggtgataattattagtgtggataaatgttctcgatggaaaggtctaaggtagctcgtgttggtagaaagaatcaggtttattcaaaaataacaggtgcaagaatagtggctggttgtgtttgtttaaacgaggaaagaaacaaggtgttgatgataacctcttccgcaagcaaagaaaaatggatcttgccaaaaggtggtgtggaatctgatgaaccaaattacgaaacagctgcacaaagagaaacttgggaagaagccggttgtgcagggactattgttaaatcgcttggtgtggtggaagacatgcgtccacctaaagaatggaatatgaattacaaaggtaacacagaaaatggtgatactatcattaaacatccaccaagatcagaattccatttctatgaattgaaagtgagtcagttgtttgatgaataccctgaatgcaacaaaaggaaacgtagatattttttatatgaggatgctaaaagagaattgataaaagccaagagaccggaacttcttgaagctttaaacagatctagtattaaaagataggttttttctgtacctagtatttagtcatatctaacatctatatctaattatataactgtttatttatttaccacccaataaaccagtcatcatgtcttgtaagaagttggattgtcttggtgggatgatattgaaatactcttgccctataaaatctagttgactttggtatttaccagcgtaatttgaataatgttctttcaaatttaagaatagggttttatcttttgtttgacatactagaattaataattgtaagaaatttaattcaggtaagttctttagataccacattttaaagatatcttctccctttgaaatcatttcataatcaaattgtggaaattttgcaacaaatttactaataaattggtctcttgcttttatggtgaaatctatattgacgataaataaataattgaagattaatctgctgataaagtcaccgacaagagtagaaacattctcatctgtgacggtgtccaaaaaccaattccatagaagatcaatatatttagtaagactctcagatgtacctaacattaaatatctctcagcttcatagacaaatccagcatctaataattttatggcaatggcattatgtaaatggggatcaccaaatttgcattcaccaaatttaatagaccaattattcataccagtaacgacatctttcaaattgggttccattggatcgatcaagactagcaattgaatcaatttcgccactgaggaatcgctgacttcaatgttggccatatcatagatttccaacagatagaatatcaaatcagtaccttcaccaccttgtttggcagttaaaaatgattgagaaccatgcatgatcaattgtatagcgtcatcataggatttactgttcacatatctgttagcaatggttcttaaagtttggtgtgcttcatagtaattacgttcctcgattctcttttggaaacgggcaatgaccctgtctaacttactattattactcattttttgactagtttttaatgatcagtatgcctattcttatgtcaatagacagtcacttctatcgtgcgtggacttgtttggctactttcgcctcttttacgtctctctgttacgtttaattatttatttattgagtccgttgcgtttactaaattatatttatgtgaaaaaaaaaaaaaaaaaaaaagaaaggatcaatgttaagaagaagtagaagaaataaaaagaatcgcaactacaattagcaaatacacgcttaggagaacaaaaagcacatatctgtgcatacgtatatgtgtgtgtaatagcttctgttgtctagagtgcattcatattatcattaacaactgtataaaagagaatcaagtgaaacaatggtggaacaaacagccatccaattaattaatgaggagaaacaattttcagatgctatcttaccttattttaagagcatcttagaagaaaaggatattggtcaaaactatcatgttatatcggtgtttggttcccaatctagtggtaagtcgacccttttaaatattttgtttaacactgaattcgacacaatggatgcacaagtcaaaagacaacagactacaaaggggatttggttagctcatactcatgaaattaataatagtcatgatgatcggtctttgttaaatgaagaattgtttgtcctagatgtagaaggttcagatggtgcagaacgtggagaagaccaagatttcgaaagaaaggcagctttgtttgctatctctgtatccgaggtgttgatcgttaatctgtgggaacagcaaattggtttatatcaagggaataacatggggttactgaagactgtcttcgaagttaatttatctttgttcgggaattcacatcaaaagaagaaggttctattactatttgttatcagagatcatgtgggtgttactccgttggaaagtttaagcgaatctttgattaatgaattagagtctctttgggatggcctaaataaaccaataggatctgataatatctcattatatgacttttttgatttgaaatttgtaggtttaggtcataaaattttgcaaaatgacaagtttattgaagatgttaaaaaattaggtgatcaattctctcagtcaccaacaaaatccgagaaggctatttttagacctatatatcatcatatgctgccattagatggttggtgcatgtatgcacaaaattgttgggatcaaattgaaaataataaagatttggatttacctactcaacagattcttgttgcaaggtttaagacaaatgaaattttggaagaaacatttattaaatatttcaatgattttgataaaatagttcaaccaatcttgaataatagagatgatttgattttagaattgaagcatataaaagaacaatgtctaagcgactatgattctatggcttcacgttatactaaacaagtttatttagaaaatcggcaatctctaatatctaagataaatgagaaatttgagaattctgttgatcaacatttaaaggatgtctccatagagctgttagacaaaataaatgatattattaaagagaatatgaataataaaaagttgactttcattgatagtttaactactgtaaaggattcaatggataaacagtacatgtccattttgaagaaatttaatgaaaatgatttattattgttatcctcggttgaacaaaaatgtaaagatttcgaaaaattgcttgattcaaagattatagaattgaaaaataacgaattgaaattattaatatcaaaagtgaggaaaactattacatttgaaattaaagatgaaattatacctttattatctaatccatccttagacgtttgggataaaattatttcaaggtttaatagtatattagacagaaatttaagcaaatataaagttcaggtagccgcagttgaaagcacagagagtgataaagataattctaaagaagaaggggatactcagtccatccaatatgattttcaacttggtcttggccaaattactaatgataccacagctaaaaggattcattttgcagcatggctttctttagctaccactactcatgattatttgaagtctgatacaatagttaatattataagagacactttcgaaaatgctttcagatacgatgaaaatgatactccaattttatggaaagatgaacaagagattgatgaaacatttaaaatggctaggagaaaggctttatcagtcttagatatattgtgtatggctaagacatccgataatgttgaaatagttcctgatgtaaatattgatgatgaaatgggcaaagaatatgaggatgaggtggggatatatcatatgacaagattctctcatattttaaatgaattagaaaaggagaaagtcttacaacaatttaagagacaagtcaatcttattgttattgatgcaaagagatctataattaagactactacacatattccattatggatttatgttattattgtggtcttgggttggaatgaatttatgatggtgattaaaaatccattttacgtgactatgcttttgattttatcggttgctttcttttttgttcatagattcaatctttggaacccggttcttaatgttgtttccgtagcaattggtgaaacaaggcaaacagttaagagtaaattaagagaatatgtactggatgaacatgagaaggtgcctcataaagctaggagtatgtaaagataaattaatgcaaaaggaagaaccaagaaaggggaatgatgattgttgataattgtccttttttttttgaaagtgattattttttaaaagtttattaactttatataaatataaatatacatatattaactacaaaaaaatgcaaaatgttacaagcttttcttcatcttaacgaaagtaacttttattaatagaggaaaagagaagaaagttactatgatgagaatagattaatacttattacaatgatgcgtgtaatttttaaatatgaattaatgataaatataaattctgtaaaaaataaaatatttttttctcatttatttttaaattgtttccatttgaagaaatattccttcagttgatgatactcttgttcgctttttttaataaaaagattttcaagaatatcttgccagaaaaatatcatattatcaatatcttcttgtgatttagggatgcttattagacaaactggaagttttttccaatcctctctttttattttactatgtctaaaataatcagagaatactgaaatccagtggctataaatgcaatgagaacaatcttgtaaagttttcaattgttcttccttgaaatcaatatatggtaaatctccaccgtattcatcattcataatgcttttgatggtagtggtgacaacaaattgaatatccatatatataacttcagctttttccgctactgtcattgatgcaaacattggggtgggatttagatgctcatcagtgtttgaattgtttatttctgttgcattcactgctttttgtaaatatatgttatcataaatttcgttattattattttcataaggtaaattaagatacatagtattattaccaaatctagcacaattttcttgatatgatttacttgcaattaattcgctagtcatcccgtcacgatatgagacagtcaatatttcttctgttaaagctttcaaacatagatttttatcattagaaagtaaaattacaaagcaacccaatttttctttgaaatatagacaacagtctaatatagaatcatctttgtaagtattaggatttaatctttgtctcaatttttgtcctatgataccagagttagcttcagctaaatttttatataaccacatattaccagctctggcatgtctagcaatggtagtggaagtggaactttttaaaccatctaattctgccactgtcgttgttggtacgactaatacatggtgataaatttgacttaattgtcttaatccttctaaagtttgtaattgtgatataataaaattagtatctattacataaacagtttgtaacttagtaggttctaatgcaatatcattatttggtaggaaattattgttgtgaaactcttgtatataattagaagaatttgcattattagaagacaataatctttgttgggtcaaataattagaaaccatttgaatatcatttgcatctgatatatcttccattaaaatatcttcttcatgatcactgttaattggtccatccgtatttgtctctgccagtctattactagccacagattctccaatagcactagaaagggtcatatctatagcattattaagattagcagtggtagttgtagcgatgatggtgttagtggtatcatttttgcacctattattatggtgaatacttttaattttatctttcttcaatgcatcatcatatactttatgacgatttttattgtattttgcttcaatcgcattatttaaatcttttagactatactttttgttagattcttctattcgttctaaaattctggagtttttatcagagttctctgaggttttattatatctgttattagttccttgtaaatgccctctttctgcgtatatggaagtcaatcccatcatgtgacaatatataaagacttaaatcaacttattaattgagattttgttccttctttgtgtctatatgtgtgtggctattgcttatccctttaaaatggattcattattacacacaatgctatatatgtttcgcctattacaaagaaaaagataaaggctgttattggaaaattgaatatcaatgtgtatctattggtgatcagaatattttgtaaataaaatattgtgcataataataatgtattgccctaactgctcctctctttattttactttttatcttattaaatagatattttttatcattcaattttagtttaatctttagatttttgacataggtggaatatccaaaattgacacaaaataaaaataaaagtttattatgacgtgagggaaattaatacattacagcattcgatgaatgtaaaaggatttagaatgatacacccgtcgtttatttattgaaagattgctatgaacgaatgtatgcaatgcaatgggataaaatagtctatataataatgaaagttaaatatctataaaaaaatactatgtagaaagatgtttggaaaaataattgattacacaatgatcacaatgtctttggatcatagggaaacattttctcagtcataatgttatgtttgattctggatcatgcagatgatatcgccaagtaatgtcgatcttgttttgattatatctggtgggatcacggataaacaacaagtgattatatcttttatatttaattcacccaaagtatactcagtcaaggatacgccctttaatagcatatttgacatcgaaattaatgcagcttttgtcatagtagggaactggattcgctctcctacttgtttttgtgttctagcaaaattagatattgccgtattacgatttatgttaatttctttcatcagtaataatgggcactgtatctttaaacggtcccataattcaatgaatctccttgaaataaaatcttgagaaaatgtgattataatttctgtggtcaatgaggcagaatttatgatagaataatctttatcaaataaacattgagtcaccgagtcccatacttgcgccacttgaggaagtaaagaatcatattgagttgataacattgggattgtcagtttcattacttttaatatttgaatccttagaggtttagaattatgagttaatagccgatctccatattgaaggatttgaatcaataatctatatgattgtcttggtattggtgatacccattcattttcttcatcacttttatttgcactatcaatggcgccttcttcatcgtcgctgtcatcaccattttcaccactattttgtttttcatcaatttcttgtattttcaatctcgattcaaaatattcttggaaggattttggttcatttggatcaaatggtagatctttatcagttctgctaatgttatctttattattattgttgtgtaacggcaaggcttcctttaataaggaaaacaattgtgattcattagtacatccccatggtttaaaaggattattatttagatgattcgaatccaattttaagtttgattcattattagataaatattttttgttcatttcattaactatgacttcaaataattggaatatttgtaaacataattcttgataaccatgataatagtctaatatttgaaatatggtctctaagatatcattaaatgataaaataatgtcataacctgtcatcttacagatcatcattaacactgtagtcacatgatttgtcattcctatgtttaatctttgagaaatggattcaattagataatccacattactaacaataagatcatgtattgatccttgatacagtattttggataatgtattgatacatgaagatgcatggaatttgatcatgggtgaggatgaagataaatggctaacaacaaggtaaagataatcaattaattcactttcaaaatttgatcccatcaatatacaactacgttcaattatttgtataactatagagattaatctttcttgttcgtatgataaaacattaaaattattaattatttcttcttgttgtaataagtttattgaatactctaacaaaactaggcaagagtcctcgatattagcttgtaaatctatattattggaagtaaaatcaccgccattattatcttcatcaaatgtaaggtaagagtcaataaaattagttgagtgtaataaatggttattattattgtattccttactcatatttccaatattattgggtaacaaatttagaatcatccataaagccgaattttggaatgataatgagacattgatagtttcaatattttgtaaatatacttgaattaagtaaggatcgaaatgattaaactgtccaatgtattgtaaaagtgtaataatctcagactccatatctttactccaaactctattattgattctttcattattgttcttgttcacattaatgctatggggattaaaaatagaatttgccgagtccttgataataacattatcttcctcaatgttggtaatattgtccattgattgtagagtttggattacgtttgtctgcgaaggattattttttaataatgattggttctctacgttcacagactgaattaattttaagaagattttatcgaaaacatttttatccaatattttggaatttaaactacttgtgtcattaacactgttaccaaaatttaattttaaaataaaattaattaactcaatactatttgtttgattcaggttgatatttgtatttatttgagatatcaactgtgtcaaatatttacgtatattagcttgaatggagtccttcaattgtgggtcatctaaataaatggagtcaaacgaatcaaatctacattgaattaaatatttaatcaagtcatcctgacatatcgatacaatagaattataacatgatctaaaacatgatttaataaatttacaaattgataaattgatgtagggattacatctcctcgctattaaaatcggaaaacattgatttatagccaactttatctgttctcttgtggctaataaccatttcttatctctatgattaatcttcgtagctttatcagtttcaatttgttttaaagtggtgtcactatatattgttacaatcaaaaattcaagtaaatcgattgatttaatgatacatttgtaattgactcttggtttaatcacaaacttaattaggttagagacattaccaggtagaatatttgataaagtttcaccattatcaaaatttaaattattttgatacagatttattagattggcaattattagtaattgtaacgaggagtcagaaagcttgtcattgtgatttgatagaatatctaattgaatagcaatcaaattagatagatttgataaaagaatatattttgtgttatcgttggtactgttgttgtcactatttttgttaaattgatttgaaaacaaatgcgggccatatatctgattattaattgattgaataaagttagaaaaagtttctactataagccgaagggcatatgtatcggtattatttttatttttatcaattatagactgcgatagataattgacaaaggggaagatatttgtagctagctttaaattaagttgatttgggtatatccatgaataaatacaaaatttgtttaggattgctagtagcttagtaataattttagcatctagtgattcaaattggatgataatttttgctaacggtatcataatatagtcaaccagactaggtgggatatttacattatcagaaccattaagtaaagtattttcagcagataacaatttagccgataatttattttctaattgcactaattgaagatataattcctcatggttccattgatcaatcggaacgttgaatgtcaattgagataacttgacacacgttggtttaaatgtgttaaacatccgagacgcaaaagatagaagagtatatggatatggtagaggattgtacgttcaagaatctataataatgacaaatcatatgtggaaatagcacgacaccactattcatgatatatatatatatatatacatatatatatttgtaaaatatggcggctagattaattatatttgaatgttgaacagaaggtttaaaactggcatgtgaatgtcacgtgtaataatattacctttttaattctatgtgcgggtaatctttttgcttttaatttcaattttcaatttcaatttcaattttctttttgtttgtgatttcctcttatttttttttcaggtaaaattgattaaattgtagataaattgtaatgtaaaagatatagagatgatattaaaaatacttgtacaagtatttgaagattgagctagagataaaaagataaagagagtcaaaatatagaaaagaaaaatatttaaacgattaaatacataagtaaaggtcaatcgagtaatttggttgattggctgattggctcaaagttgtgaagggaaaagaaaaaaacaaaaggataaaagtgaaaaaatggaggacttaacagaacaatttcaacaatttggatttgaagattctaagattaaagaaattttgaagaataaaaaggtgaccagctcgttgtctttattattgaatcaattagattctaatttatcaccacttaataaacaatcacgttctttgatccataatttagcatctcttttaaaaggtaacgatttaccaaattctgaatggattgttcatgctattcaaaatggtcaattaaagacaaatttacaagttgaatctgcttttaaatatatttctcaatcagtttcaaataatcaaaccccgactgttgaagaaatgaataaagaatctggtgttggtgttatagttactgaaaaggaaataaacgatcaagttgagttgtatttcaatgaaaataaagataccattctaaatgaaagatacaagattgtaccaaaattatttgcagcaatcaaaaatttacctgaattaaaatgggcagacccaaaattatttaaaccaattattgataagcaagttttacaattattaggtccaaaggatgaaagagacttagttaagaagccacaaaagggttcttctaagaacaagaataacaataataataaaacaaagcaaaataaggatacagcaggtgattctgttcctaagcgtaccatgtttaacgagggttttcttggtgatttacataaggttggtgaaaatcctcaagcttaccctgaattgatgaaggagcatctacgtgttaccggtggtaaagttagaactagattcccacctgaaccaaatggttatttgcacattggtcattccaaagctattatggtcaattttggttatgctaaataccacgatggcctttgttacctaagatttgatgatacaaatcctgaagcagaagctccagaatatttcgagtcaattaaaagaatggtctcttggttaggtttcaaaccatggaaaatcacttattcaagtgattacttcgacagattgtacgatttagcagaagtattgattaagaatggctatggttacgtgtgtcattgtactgctgaagaaatcaaacgtggtcgtggtattaaggaagacggtacaccaggtggtgaaagatttggttgtgttcatcgtgatcaatctgtcgaacataacttggaacaattcagattaatgaaagagggtcattataaacctggtgaggctattttaagaatgaaacaagatttcacttcaccaaatccacaaatgtgggatttgattgcttatcgtgttttaaatgctccacatccaagaactggtgataaatggaagatttatccaacatatgatttcactcactgtttggttgattcttttgaaaatatcacacattccttatgtactacagaattctatttgtctcgtgaatcctatgaatggttatgtgatagagttcatgtctttagacctgctcaaagagaatatggtcgtttaaacattactggtactgttttatcaaagagaaaaattgctaaacttgttgatcaaaagtatgttcgtggttggaatgatccaagattattcactctagaagctattcgtagacgcggtgttccaccaggtgcaattctttcatttattaacaccttaggtgtcaccacaagtactacaaatattcaagttatcagatttgaaagtgctgttagaaaatatttagaagacatgacaccaagactaatgttcgtcttagatcctattgaggttgttgttgataacttggatgatgattacttggaagaagttaagattccatataaggctggtgctcctgaatttggtgatagagttgttccattcactaatagattctatattgaaggagcggacttcagtgaaaatgtagatgataaagaattctttagattaacaccagaacaggctgttggtttaattaaagttccatttacagtatcttatgttagtatggaaaaggacactaatggaaagattacaagattgcatgttaaatataataaagatgtgaagattaaaccaaagactttcatccaatgggttccagtgtccaagaaattcaactcacctgtgaacatctatgaaacaagagtctacaatcaattattcaaatctgagaacccatcaagtgtcccagaaggttatctatctgatattaatccagacagtgaaattgtttacaagaattctgtcattgaacataatttccacgatgtcattgaaaacactgagaaatgggtgactgatacagttaagaatagcgaattttatgttaaagaagatttcaagagtaacgaagtttgtagattccaaggtatgagagttggttattttactttggattctgaaagtaataagactgataagattattttaaacagaattgttagtttaaaagatagtttatccaaatagttaaataatatgtatgcatatatatatgcttgtcttttttgattgtacatttattatttgtatactataattattatggttgtattttgtataactttacaaattgttttacctgtttagtgaatgaaagatagagggtgaggattaggataaaaaatagtttgtctatatatatatatatatagtattgcaaaaatagagtggggtgtggatataaagtataaagtatattagataataaattatttttatattgtaagcactttttttatattatatttttcattatattttttatttgttggtttatctaattatgtatttatttatttatttatttaattttattttattttatttagatataataattatatatgaatatatatatatgcatgataaatttttattaaataagaaaaaaaaaaaagaaaaaggttcaattgatccatggtaatctaaaagatcgttaatttttgtagattcatgaaaacacctacttttcataaaaatttaataggtattttttgtatttgatagtaaattgttatgaaaatgatagtgataatttcacatccctggcacttgtattttatttattttttagaggaaggagtaggatatgttatttgatttgtgaatcaaattcagtatccacatatgatccatttcttaataaggttttcaataatcctgggataacttccacttgtaatggttccaatggaaaattttcaccatccacagagatcacggtattatcaatttttggtactaatctataggccaatactttccaatgaatcacctcaggttcatggacatgtgtccccttatctagtgacaataaaataggagtaatcttatggataggagttcttgtgtccgttaggatcatatcgatagttccatcagcaggcaatgcagcaggaaagaatttgacatccttggccatatatggcattttcccagtgtaaaaaatcgataggttatcagtaatgttagaatcgattttttcccaatcatcagggatttggtctttaatagaatatttcaaatggaaatctttctcttcaaaaggtgattctgtttgatccccttggtgtatattgtcagattgtgatgttggcaaattatccgtgatcgagacctgtgatgtatttggagtaaacatgagtacttgtcttttagatttgttatgcaaatagtggatattcaattgttttttggtttttgtagcatacttcacgtaaagatcacatggatattttttgtatttaagaatattgaatgcgacaccgatatcgaatctgactgggcccatccatctgataaattctgtgttgatatctgattcagcgatgacacctaaagtctgtgataagaaggataatcttggatatttatctacataagaaggctgttgacaacacattacatctatcctagactcgatagattttaaaagacacagagtagagtatgatggattcattgtccagtgacaagatatactcattgcattccctgagccacaaggtagctgtgtgacacagattttgttgaacgcacgggctctatcaggtctttggtataatccattaatgacctcattagggatcccatcaccagaacaacatgctatggtatcgaaagaatcgacatctatttctcttgcaatatctattgcatgttggtaatatttagtaaacgcaatttcatatttaatgaatggggaggcatcgagtattggcttaatttttttgttaaatctttgtaaagctttacctgacccaccatatggattaattatgattagaatggatttttctttacgaacattttgataggatttttcaataatgtgagaaactatgtcaaaattactagttgttatatcattcttattattattattattattattattattaggcagtggatccattaataacttaagctttgtcggtataacatctttaccttttggataaacaaaagttaattcaataaaaatctggttaatattattgttattagtggtgatagtagcagtggtattatttttgttgttcttattgttgttgttactatttaatgattcataagtcgaacttaaattaatgtcgctatcaaaactttgattttgaatattgacattatctttgttaatactattgctattgttatcattatttttagttgttggggtagtggtagtggtgatagttgtagtattagaaataggatgataatgattcaataaagaagtttgttcttcaacatttgtagatttatttgtttgtttataatttttttttgttttgggactatttttatttttatttttatttttaatattcagaccagaaatattagtgtcataaacatctatatattttgcataaataattctactgaatggaataatagtttcattaggtattaaaatttttttactattattattgctacagctatcactactattaccactattactattattactaatgttattagtattagtagcagtggtgctgctaatagtattactatagttttgtttttgttttagtgtattagataaagttacacaaggactaatacagattaatgtgctactgccattattgctgtgatcagcgatatcttcatcataataggaatcgtcgtcgttattgtaagtgaattgagatttaattctaatcccatcggatgtcaaacatcccctaatatgcgtactatttgaataactgaatggcattgcagatgatgacatattgggcaaacaataaacaacaaacaacaacgaaaaaaaattaaaagaataatattatgaatatatgtaatcctcaaatttatcttagatatgcttaaaagaaagaaaaaaaaaaaaagaatggacaaatcctggacaaatcctggacaaaagattggacagttattatttctgtattgtaaagtaataatagcaagacctatatatatatatatatataatcatgtaagtatggatgatatatatgggtaatggacataaatgtgcgtgtgccttcaatataacgggggaataaaaaaaataaataaaaaaaaagaaaagaaaaaaagaataatttcccttatctcgatctttattatgcaaggtaaaaaaaaaaccagaataatagcagaaatccgtcatgggcgggaaagcggaatttcctccaccgggatttatttccgaagtaatttccggtgcgtttttgtcttttgttttttgtttttcatttaatcactcacttattccttgtaatatcaataaacaaaacagaataaaacaaaataaaaataaaaaaaaataaaacatacacacagtacaagtcaaaccctagcctgtcctctttttccaacatcatagatatgtattgtgtgattatactgaataaataattgttgtaaagatcgataggtttaatagggtttgatagagaatattccactttggcctgttttcttgtaatatcatggtacataccctaaaacaaaaataattcaaaagaaaaaaggaaataagaatagttgcatatatatatatgtatatacatatatatatatgcaactattccttctcttttatagaagggaaacatatacattacatgaacttattgtataaataataatacattcatagcaatgggtgtatggatgtatctgtgacagagtttgaaagtttccagaattagggtatgagtaaaaagaaataaagaaaagctctttttcgtgtttatcttattattttttttttgtgtttttttttttgtttttgttttttacttgagaagatcaaaatgtaaacaaacaccaaatattattattattaatgaaattataagaaagataaaggactttttgacaccacatttcattctcatctatactttcaatcaaccaaaaggtaacatatttatatatatatatttacttattaacctcttttcaataccataatagccttttgtttgtttgtttgtttgttttgggtttttcctcctctctttttgatatattttagataaatacaacaggaaactatttatttattggtttatttatttatttatttattttctttagcaaattctttcctatcaactttggataatggttcatatggataataatccttctttatcctcttctacggcaacctcggagagttcaatgaatattactgtcgctgtaagatgtagaggtagaaataaacgggaaattgatgcaaaaagtcctgtaatagtttctgttcctaacactaccgcttctatcaaccatgcatcaacttatcctaatgaagtttctgttaatacaactgatgatataggtataactgcaaaattaaattcgaagacatataaggttgataaggtttttggtccaaatgtctcacaggaagccctatttaatgacatcattataccgttatttaatgattttattaaaggctataattgtactattttagtatatggtatgacatccacggggaaaacttataccatgacgggtgacgaaaataataattttattataaaagataaatttgtatcacgtaacaacataaaattaagtgaatctgcaggtataataccaagaatactttgtagattgtttgatacattagaatatgagaaaaatattttaaattgtaataatagtcatagtaataccattaatgatagcacaggtacaaaacaagatatagactatgttgtcaaatgttcgtttttagaactttataatgaagaattaaaagatttattatacgatacaactggttcaaattcaaatgatactattataccgccgagtaaaaaattaaaaatatttgataataatggaaataacaacaacaacagcagcagcagcagcaataatatcataaatttaaagagagataaaaataataaatttaaaagatcaagaaaatctatgtcaaatagaagttctttgcctatatcattagaaaaatctaagacttgtaacaatactaatactaataataataataataatgtaactactacagaaatatatattcaaaatttaagagaatttcatataaataatgctaaagatggtttattacttttacaaaatggattaaaacaaagacaaatggcttctactaaaatgaacgatttttcttcaagatcgcatacaattttcactattaccctctataaaaaatttaaagatcaactatttagattatcaaaactaaatttagttgatttggcaggttctgagaatatatctaaatctggtgcaatcaatttaagagctaaagaagcaggttcaattaatcaaagtcttctaactttaggtagagtcattaattctttatctgaaattaatgaaaacaaaaaagatgaagatactactactacaaataataataacaacaataatgataatgataatataaaaaaggacactaataataataataacaataataatataacaaaaaataaaacaaaaaatattcatattccttttagagaatccaaattaactagattattgcaagactcattgggtgggaatacaaagactattttaattgctacaatatctcctgctaaattggtgttagaagagacttgtagtacattggaatatgcatcaaaagctaaaaatattcaaaataaacctcgcctaggatcctttattgtaaaagatatgttattaaaagatattacacaagaattagttaaattaagagcagatttatggtctacaaaatcaaaggatgggatttatatgtcacaagaaaattataaaaatttaatgaatgaaatcgaaatgaatagaaatgaaattaaagaattaaaacaaaataatattaatttagagagatctaatactgctctattagatgaaaataaaagagtaaatgaattattacaaagacaaaatgacaagaatacaattatatcagaccaattgattcaaattagaaaacagaatgataagaaagatatccaattaaacgatttaaaaatcacttatgaagatttaaataaatcctttcttcaattaaatcaaaactttaataaaatcaaagaaaaagaaactaaactaaaatcaaatattgaatcggttttagatttggaatttcattctctagaagacagtattatgtcacaattaaagaaagatcaaacattgataacaaataaaagtattaataatattggtccaaatatccaaacaattaaggatcaggtaattcaattactgcaaaacacaaaggataaagctgtatcattatacaattcttgtattaatgacttattaaaagaaactccaacaatcttcaatcaaataaacgataatataacaagtatcaaagatatgactacaatatattataatgatatggcagaaaaattatcagatttaagtgaagaaaataacacatttaaacaattcctcgataaacagctattaataaaggataatataattaataataagactccattagagaatgatatgattaatcaacatgtggaagatactttaagaactttagagttatcatcaaataatttaattcaatcattacaatcgatgattatagaacatttcaacaataatagaaatttgttaacttctactgtagacaatgtcactaagagtgtctttgaatgtgataataaagaattaaagccctattttgataagtggcaaaattcaatagagttaataaacaaatcagattctattaataataaatattggaatcaattaaatacacatgttgaacaagtgacaaatgtaatacagaattccagaagcttaatagataattcaataaaagtgattcagaatcaagatattctaagtgatcaaaatatgaatattattgaaaagattaatcaggataaaataattgataaaaatttcaagactattaacaacaatattaatatattagatcaaaatgttcaaaaagattttgaatttaagaaaaaatccataggaatgatacaaggtatggagaaaaagatacgggccattatacatgaagaggtagagaatttaattaataatgatgatgataatattattattaacagtgggaagaatattgagaatcttaaaacttttagaagtattaataatttacaagaacaaaaaaatgagctacaaattactgtacctttaagaccaacatcattagtaaatacagattataatggatctctcataccgagatcacgatctgttagtccaaaaaaaaagattatttaaagaaagcaatgatcaaaataatgaaattactagttcaaaaataccaagaataagtagataaatgtgactataagtaaagaaattaactgactaactaactaaataaataaataataataataataataataataataataataatcaaagacaatttaactaacctacatgtaattaatgagcagcttaacgaatatataaaagatatttttttacgccttcttatatttgtaactatacggaatacttaatatatatacagttataggtactaatatattactctttgttataccattatatccagtgtcattcagatcttgaacattttaagtagtctgttatgattcaacaatttacaaccctatagtctccaatatcatgaagaatctgttctatagtgtgtcttgacttccctaattttgtacaaattttatcaaatgattcgatattttccaatgatttgagtagcaataacctttcttctttgttcaatgtcaaagattcattagtgctactatttgaagtattcttctgatttagagtcttatcgatattataattggtattggatttttggaaagaaactttggacaattttttatatatagaattcagtattttatctcccatatcaaattttatatcagatgttgatagaaatacttgtgcttctttaattttattattcgattcattttcatgatcatgaacattccaacccatatcattgtctctattgtcttgattaaatataatatctcttttccccatgactggataggattgaattctataaataatttttttaattataccaaaatgaataaacttccttatatcaataaaattactatggataatctcataattcgtctcataccaagtagataatgtagtattatgagatagagaacaatataaatcaaataaaatagatttggaaacacaaatatattttccatttgaatcgaatttggaactagatctaaatgttccaacgtcactacttgatattgtgctagttgatctcattttacccatatttgaataaatcatggatgaataagtagattcatcgtcatcatgtaaatttttctgtgtcttaaataatgaagacttgacagaggaagatatagattgtgtttttttatgtaatttgatagggccagtttcatctttatcatttttaaatggtaattgatgtaaaagggagtctcttggtaaggtgacataatttctacactctgtggccattgtaggatctgttaagaatgtattaatcagacttgttggtgcataaatgttactaaattgaaagatatcgatgatgataacacacttataatatattaaatgtttaatacattctataacaagacctgggtcacaattactcaatttcgaaatggtaaaaatactattcaagcctgtaatatacggtattattgaaatcatagtaggatcccaattcaaatcaataatcttggctaggttaactattaacattggtacatcttcaacagataaattcgcagctttgggtgtctttaaaagagggaatatcttcaagtcgatggcatgaccttgatttattggtatcaaacattcagaataattgtttaaatcttgatatattctcattaataaatcgggcatagacaataatttttcatcagagttattgatattgctgtgattggtgtggatgttattattgttattgcagttaaaattgctatcatttttaaacaatgcaggatcatgttcagatctggataatatttgtctttgttcttcaagcgatctaaacattttccccaatctcataatggcggattcatatggtgaagtttgacaatcatattggaaaacaaagacaagattaaacctaaaatagtttcttgcataaagtgaattattgatggccactgggtatgaaacaattctgtaatttgcatactttaatgttaatagtctgtgacacaattgtggttttggtataatataatttttaagtgaatcgaaattaatattagaattttgtaaattattcggtggaaattcataacacaccttcgaaccttctgttggatgaaatattgtataaaatattgtatggattggttcaaatcctttgaattgactatctttttccatggtaagtcttatatcttatatatatgattagattgtttgactatcttattttagtttacttaccctttcaacattacgtgtctaatttatggggatatgaaaccttgagtaataagaacaaaggaagaattgaagaatgtagggggaaaaattatagaacaatattcaacattgaccccattatcaattatcttcgtcatcttcagtagtaatatcaaaatctcaaccaaccaagttaggatttgtacagtcaaaaaaaccaagaaattttattttattttattttattttattttttttcttttgaagttaataaaagccacaagagagagaaactgtattagatttgaatgcctaattcattgctattaatgtacagtctgtatatacgggtagtacacttgggtacttgtacttaaatgatgtttagtgtgtgtatctatgtgaatagttgttgaagcaaccgtctcgtttcatgaagtgacaatattacctaaagaatcatattttatttcccattcctcctccctctctttttcttcctcctcctcgacttcacattcacgttcttcaatgatattacctaagttgtcgtatttaacaggtttagaaattgattcaaatctatcatcatcttcttcttcttcatcacttatattgagactgttcatcttcctattaacattgcccatcatccagatgtctgtattttgcacttcttgttttcttttctggttttcttcctttaattttaataaccattcttcttctgcctttttgaccgattcactatcagtacaattctgatatatctgtaataactcattattcaattcaaggaagcctaaaccccaagagaaatgcgacaataagtcacttgcccaatccattctaccaatgatagcaaaacatgcagcaatggcctcgacacagttaagtctccacggtctaccatagttgacttgattagcagccactagatacggtaataatctttcgtgtttaccaccaattttattaaacgggatttcatctaatcttgcccaagaacactcaacgacagatgcaccatatttctctacaatggatctatcatttggacagactacacttttaccattcggagatataacaattccttggaacctttgccccactttcaaagacgtgatcaaacccaatctttccaatttcttaccactgcacctctttggatcacaatggtcaaaatcccacattgccaatttgacgggaaataattgtttggattttgaatgtccgtattgctttatctccatgtgtttattattttgtcttatatggtgaccattggcacccctatgcttactttttgatggtctatcatcatttggtttgtttttaccttttcctttacccatattatgtatagtgcaataatttagagattactatatatataactgatgcttaaaccaatgtcctccctctcgacgtgctatcgatcaatactagttttcttcctctttttttttctcaataatatatatatgtgtgtatatgtacataccatatgtgataaaagtttcttctattatgctcgcatctcatcttatctcttctcatcttcattaattgatgatttcaatcgagtatttcacatttggtataatctcttcttttttcctgtgtttttccctttatacgaatcttcaagccaacgaaattgatatacgacacatatcaaaggtttgcataagcgtataatgtattagtatatataaatggagatctagttgcttggttggttggccgatgccatatacggtaataaagaattgattatttccttacatatgtttgatcagttgtttatttgtttatttccataaattactcagttagatatttttacttatgtgattccaactttgtccattattatgtcgaatccacatcagattggtaatcgtaatagtgacaatgatatatcctgttattatctacccaaactattgaatccattaattgattctatttttaattgtcctgatatagacaattcattgttaaagaaactctacaacaaattgaaaagcttggatgattttattgtcattgtaccaccaacagatattttattattaaaatttgacaccgctaaaaactgtactttaagagatttatgttattctaatattgattttgtatcaaaccatattgtgttttctaaggggaatattaatattaatgttaatgttaggaataataaggcattttgtgttcgaactatacatggtaaaagtatcataattaatcaacatcgcccttatttatttacaaataatggatttggtacaaaacaaaagtatcatatattaaaatttgacattttgattaattttaataactattttcataataataacaataatggttatagaaaattccttttgatttatattgatcagcctatattggattatagtttaaataatttaatatttaagcataatttacaatgctttgatatcactcatgatcataaaaattcttcttcctcccttgcccttccttcttcttcttcttcctttttattgaatgatataccctcgtttgaaaaggttcttcttttaaaccctcaatggttagattatttaaataattttttaatagaatataaaaattcacatcaatgtcaagacgatttatttataacaaattttaatttaatggtcaatggtttttatcttttaataaaagataatccgatttttaaagtaattgataatttaaaattacaaatcaaaagttatttcgaactacaattatatgactacatatggaacattataaaattaaaggtacaatatttgtcagtacttaataatgatgatactgagtatcatctaaattatttatctctagatcaattgcaaactgatctttacaagtcaaattttgtatcatttagattatctgatattgttcaattagagaagaatatttcaagggctattactgtctggaacaaatttttttcatataagtcacactttaagaaatgccagatattagttgaaacgttacaatcattgtcaaaaccaatcacttcgtcaaataaggaaaatatatgtattgatgccgatacattgattaacttgtttgttctaattgtaaataaatataatttgcatgatgtgaaatgcaacttattttatcttcaaaatttttttgatgacgaaaataatattaaatttggtttgttgggttattcaatatcaactttagaagcatctatcaaatatttggattcattgttaaataaagacacaaaaagactaaggaagctacaacagcaagatattaaacttgaacattttatagaatgtattactggaacaattacgttcacagatggttctaacaatataactgagtttttaatcacttttaaagattgtctcagatacagatctgctaatggacaatctattctttcatattgcatacagtatcatcaaaatgatataattatagaactcttatcaaacaaactttttgaaaaatgttttcccttagaagatctgttagatgatgagactattgatggatcaactttattgattcagtgtttaaaatattcaaatgatacaattgctttggttttagtggatatctttctaaataactgttcctttgaagaattggtaacatattttaaacgaagagataaagacggcagaattgtagcacattaccttaatggtcaaatagatattctagagaaaattggtcagtatattgagtgggatttaaaagataatatgaaccaaacacccttatttactatatttcgttgttatgatcaaataaattatgatttaatggtatcaatggcactaaagtttgcaaattattggtacaaagagacaaaagatcgattgtttcttgtgtcagagcatattgattctaaaggtaatagtttattgcatattatgaaaagcaatatatccattttattgaatttggctgacggtaatgaaattaatagatgtaataataagggaatgacaccactgatggtatacgttaaatatgacagggtatcaaatgttgaagcaatattacaagacccaagaatagatttcgataagaaaattaaatatagtgggttacattgttttgattttgcacaaaatgaaattataattgaattattaggtgtttatgcattgaagaaaaagtctatctttaagcatatatatgtacattctttaaaaacacataataattcaagttattcagtaaaacttacggtcagtagttcacatatgaattcaaataatttctataaaacatttgatgtgaatcttcgattaattagaaatcttttcaaaattattcagaaaaaatattctttgacatttttaccgttaaaagaacttctaatgaaaatagataagctgatgtactctattcaaaaaaatagtttgagatggattaaggtacaggaaagagaaactattttgtcatggatgacgttatgtttagattcattgatccacataaatattttgtctgtatcggatatttttaaagatgaattaaccttatctgaatggatacgaaaagaaaatagtatgtccatagttaccactgatactaccattataaattgttataataagtctcaattatcattcaattcaaaattattagaaccagaagaggtatatactatgcagaattttttaaattttaatttagaagagttgaaaattttggttccaaaatatatagctttgaagagcctagttgtatttttaaaatttaaaaccactgatattatagagtctaagaacatgcttaagctaatgtcgtgtaaattttatgcaaacatggcagtaaaacaagaattaaattattcaaggaaagaagttacatattacggaattggaggacttaatttactgttacaaaacctagaatttatggaagtttgtattatgaaactcattcgtcacattaccgaatttttagatctcaaaatttcaggatggtggagactatatagggaatttttgtccttaaaacagtgtggtccagaactggaaaagctgatgaattcagaaaatgaacacgatgaaattataaaaacagatgttaaagtgaatactaatatgtttacaaatattattggtagtatatttgaaaagacaaagtcaagtagtgatagacaaataaatgaacatcttctaaaggtcaataaaatcttaaagaatgatagcgaaaaaataagaagagaatatgaacagttagcagaagagctcagcaagtttgtccgctttaaatcggcattttttaagttcggtattataaagttatgggggggattcaatattaaattgatgaaacaaaatttgcaaactctggaaagaaaatagaaattactgcaaatttagaaatgtaagtatgctataacaagtgtacctcatactatcagtttgttagcatgatattttaaattatagatattttattcaattgtatataaaatattatgttgatacgaagaaaaagatatatgtattaaataaaatatatttatatatttttattttgtcttttatttcttgttacttgagttaccagaagcagctcccccaaataaattagaagccatgttttgaatatctgggttgttcattaaatcatttaaactggtgttaccactagcaaaattttgagccatttgttgtatagctggattttgcatcatagattgcattttttgcattgcatttggatcttgcatcatagattgagctgcttgcataacttgaggattatttagcaaagcacctaaacctccacctaagcctccacctagcatagaagcaaagtcaggcgtattacctgaaccgccatttccaaacattgatgaaaagtctggggttgctgtggaagtagaactagttgtctgatcatcttgtgtcgcttttgtaactggtgaaacatcagaattttcagtgttgcttttttggttcaatgtctcttcgaccttcttcttagcggtttcatatcctctcttcatcacttcagttgcattatccccttctatttctaaaacctttttgtaagcttctaatgcttcctcaggtttatcttgaacatatttggcgtaggctaacctggaataacctttagaatagttaggatcgatcttgattgcagcagtggcatcctctacagcttcatcatatttttgtaaatttgtataagcagcagctctgttggcatagtatacagcatttgttggaagtactttgattgcttcagtgtatttttcaatagctaattcaaatttcttttcagtaatagccttatttccttctaatttcaacgcttcagccttggctttgatttcagcatcatctttagggatgttaactttaacgtcttcattgttatcttcattggcatattcttctatagttttagttaagatttgtttcaaaccgttaccattgaatttttcaccgataacagatttaatagaatctctgtcaaaatcaaaaacatctgtgatacaatcgatggcaacattcaaggaatcacagttgtcatttgagacttcctgtttatcgataacagtagataaaaaatcaacagtaagtgctgctatttctttgctggttggtaccattctttaactttggtttctttggttgttgttttgttcccttctattgcatatctgacgttcgtcttttatatccataaaaattttaacacctatttgttatttcttaaatgctacgcgcaacgaaaaaataaagccttccccgccaggactcgaacctggagtcttctggttcgtagccagacgccgtgaccattgggccacgaggaacaggactagttacgtttttagtagaatagaatggttattaccatcaagattatataagatcttgaatgaatctagaactatttattgttttaataagctatacacgtgctacaaaattagatgctgcataataaaatgattagattacataagattttggcaaatctagaatttacctattgttttaataagtcccacgtgtattactaattaccatgattagagaattggggtgcagttctaatccactagtgcacctaaattaatgtaataaattttagggtttgaatcagtcaagtcattaatgtactaatctgaataatcgatcgagctccagaaaacatataaaaggacaacgttctctggagataaaagatcatcttccataaccgtttcttgtaaataacttatatattatgtataacaaaatagaacaacaagcaagtaacaagtcaagtaacttcgaataaatatattagctcattaaaagccgctcaatatataagaccattttagtaattatattatcgactatagttgattactgtctcgattatttgaataactataaatattatttgcacttccctggaatacataaagaatctgacaatttaatgctacaacacctctgttgtaatatgatgtgatcagagttttgtgttattcggggaagcgctagaaatatcaaacggataatctattaataattgcattaccgattgtatcaattactgtctcgattattaatagattatccgtttgatatttctagcgcttccccgaataacacaaaactctgatcacatcatattacagcaaaaagtaacattcaggagcttctatggccaagttggtaaggcgccacactagtaatgtggagatcatcggttcgaatccgattggaagcactgctttcttttttatcgattgtgataaccctatggttatgtgtgtctgataacaattaatcttattggaataacaacaatacttcattcgagtggatatggatttatgagtgaagggctgcttcttgtattatattattataaatagggtgttataacaatttgttttttttaaacgtctgtttcaattaatgttgaaaatggtttggttatcacgatttttgtgatgtttgtctttatgtttagtttttctttcttaaaaaggcgtaaatgttttgcaaataattttttctaatttcttttgcacattattatataaagaagtgaaatatgggttagttatctctgaaattaattccatatcatttatatgaatatctttattttcattgctggaataatatattacctgtttggggaacatataaatatatcaaagaggaaaaatgtttgttttgcacatttaatattacagagataagatcaaacagaataaaaataaattaatatattatgaagatttgccaaaaggtaaacatatataagtagacgattttacttattaattttccaatctggatgaataagttatatacattttattatatgtttctttttgtatttatataattattaattcccaatcaagagatggaggggaaattactctacatatcaacataataataatacataataataacatacaatatgagcaccgacgctaaaaacatgtgtactaatattattcatccagaggacaaattatgacagaaaataataaaactttttctactgctaatagaagccaagacctgtgtaacaacaaatattttaaataaaatcatttttcaaagttttctaaacacatattatatttgtagaaaaaaggcttgttgtattaattataaaaaaaccaactgcctttaaaagaaagattaaataattaaaaaaaaaatagattaacaaaaaagttcggcctttaatgtaacaactattgttttttattctaacctagaattcaataaaaatctcattgaaaagaaaataatattttaactgataaaataattttaataattgaattgactattaaatcaaaatttggctatagtcaataaaaatcaaaaacaaaaatcaatttttttagaaacaatttgtttgtaagcaagatataatcaataaaagaaaagaatgaaaatgatttatttgaaaaaatttaattgttaagataaatttgtctataagtattaaccatactttaaaaataatactctcaaaattatagaataacctttactatgctactgttgaagctatgttatgttaactaaatttaccaaaattttgaaaatatttttatcgtcttaaactcactcatttttttaatcaaatttctgaggaatctagatttacaaatttcttcaatcaaagttcctgtaaaccaaaacataatattaaagcagtattaaattattattggcttgagatcaatttttttaaacaatcaaacactagtgcagcatataaggaacctaataataaaaattttaaaaaaaaaataatggaatttatcaatacagtcactgatagttcttaacacttttctgcatatatttttggtgaaataaaagaaagttcaattccagtgtattttaaaatctgaacaagaaatatacaaattctatggaccaggaatactaaatatagtaaatgaatccttctttaacattattaaacatactttttataaacttttagtgtatgcatatcaaatataggtttttttattttttccattttaaatcaaactctagattattaaatcaagcttaaaataaataaatgagtccaaaatattggtattatgttcccaataataataataaattcaatttttcagcaaaaaaaaagttcacaaaaatattttcattaattactatatttaattttactttattagaggacaaaatgaagtataattttttattaagactgaactacgattaagccaataaaaaaaacaaaaatatagtttatttttatgcagagatacagttaaagtcaccattattccatcagatatcaataaaaaattataattatcatatatttctcaaatttgaacaagcattccgctaattattagtaaacatctattttataataggaaatattcatttaatgaagtgactgtttactatggtgataatttacaataaatattttcctcaatatataaactaatggaaatagaaatttcagtataactgtttactcaagtagagaagaaagtggtggaataattattataatcattgtatattaaaaaagttttttattaatcagaaaattttataatgccaataattctatatgcaatgtctagatatataaaaaaagagcataaattttcaaaagagagaaaaaataagatataagaagataatctatttacttttatacaacataaatgtttatgtatatatataatatgtacaaataaataaaaaaaagatatatatataaactaaaaagatctgatgtgtgttcaacgtttaagaccacaggagtccaataatatctttttaccagatttagaatttgtatacaattccactctctaatctgctgatagaactgccccctttaaaattgatattggatttattctccacgaacctcttattgacattggtagtgaatcttctgctagaaggaatactgctgttaaattaaccaaaaaactacaagcctttactttatgtacctgtagctatttatcagatcgccaaaaaatgctagagactcaagacaatcctcacagaaacctactaaatttaaagttgctggctttattttgcttattagagaagtatatttcaggggaaggaagtatttaaaaatacaattttttttagctccgtttaagattgtgaaagtattaaacaacaagactgtcaaatacagtttactctctttgttcaagaaggacaaagtaatcaatatctaacattaagaagtttataaataatactcaacattattctaagaaattaccgattacaactacaaaaagattataaagtgttgaaataaaatgttttataatgaaatagatagaacaataagattttagcagacactaaacgataaattgttgggtaataatcgttgagaggtcaccaaaggttgttgagtttgtttattaaatatcttactattcgtagaggaaaatggttgaatgttaacatatataaagccaaggatttcatcatacattatttttatcttatttacaatctttgtatattattatttctatgttgtatatagagaaaaaaagcaaagaactttattataattttgtatactaaatctgtttaatataatattgagaatgtttactatatatccaatgaataaaggcgctcattctcaacataaagacttcctgaaattattagtgtgagtgattatgatataaaatccacccatataccacgtatcttgacacaaaatctattgtataacaaaaagcaatcagcatcaagagtacataaaattctagttaaatctaaaaatacctattgttattgaaacatcacccatttatcaccacttctcataatacttgtgccatttaccactataccatattatcctaaatattccatgaagtctgaccaaatcactacaaataataaattgaggtatggtttactaatcaattacgatagcggattgaatagttgatagaaccagatatatataaaaagacaacattttctgggacttgattaactattcagattgatatagtaatggattagtaatctaatccctacttgattccttataataatttgggtacactaatgataaacagcacaattcttatgatcattagtagtaagtgtgtaacttattaaaacaataaataattctagattcactcagaatcttatgtagtattgatgatgataacctccttattatggatcatatcgtgttgtaatatgagatggtgagattctttatgtattccagggaagcgcaaataatatttatagttattcaaataatcgagacagtaatcaactatagtcgataatataattactaaaatggtcttatatattgagcggcttttaatgagctaatatatttattcgaagttacttgacttgttacttgcttgttgttctattttgttatacataatatataagttatttacaagaaacggttatggaagatgatcttttatctccagagaacgttgtccttttatatgttttctggagctcgatcgattattcagattagtacattaatgacttgactgattcaaaccctaaaatttattacattaatttaggtgcactagtggattagaactgcaccccaattctctaatcatggtaattagtaatacacgtgggacttattaaaacaataggtaaattctagatttgccaaaatcttatgtaatctaatcattttattatgcagcatctaattttgtagcacgtgtatagcttattaaaacaataaatagttctagattcattcaagatcttatataatcttgatggtaataactatcctattctacgacattcgtagcatccaggagcttctatggccaagttggtaaggcgccacactagtaatgtggagatcatcggttcgaatccgattggaagcactgctttcttttttatcgattgtgataaccctatggttatgtgtgtctgataacaattaatcttgttggaataacaacaatacttcactcgaatggatataagatatagactcattctatatctttagatgcaatgttgctatgtgtctatatatttctaactaatggaactaaataatatgcgcttatataatatatatataatcttatgtaatctttggttccttgtttttttattgtttattcgttgttccttcgataatcttcttagttgctcttttgtacttacactggttactcctgcttttatgtatgttcgcataacattgtatctatataacatatcttgtataggatatagaatgtcgaaaaactgatgatctattaactggatatattgttagtatctatcctgtcccatattatatgaaatattactaaatttaacaagaaattcaaattgctacgtaatttttttacacggattaattctatcgaaaattttattcttttgtgttgtgctgaatatatgacattatacatatatacataaaatatatatataatatacaaagaatgacaaaaactttttatttcgtctactatttgtgcacaaaattatctaaagcaaaataaatcttttctttaacttaatcattgaacctcagtaagttttaataatattatacacaaccattatataatgtgtatataatatgataaagaacagagtttattttcattttctgcctcttaattactaatatttttaatgaatttgattaggttatgaatatattctcgatctcacttttcaattataattaataatgcactgatacaattataatcaaacttccaaaaacatttggaatattacaatatattgatcattacttttaaaatcaaacaatacaaaaaataaatcaagaaaagaaaacaccattttttattattaaatacaaatattaatttcttagagtttcgtattatgtgataaataactattttttgaaaaattatattctaacatattgcaaaatatataatactttttaacgaaaaaacattaaaataaataatattatacgattaataatagtaatatatatttacggaaaataaaaataaattaactataaataattactaaattattttataaaatttattataatatcatgtgattaatgtatattttgtttaatataatatagttgtttttttttttttttaaaatagtttatattaattattaggtaataaagtttattatattagaaaaatctcatctataaaatagaaatattactgtttttataacaacaggtaaacatactacagtagtttgataataatattactttctttggatgtatatttatatatatatgaactttcccaagaaaagtattaaggatattaatattgtgatactactaccactacataaattattgttttccaaaatgaaaatatattgtggaaagccaatagatagcacattataatatttttgctatattttttttttgttttgaaaatgttattgcttcataatttgcatatatcattgtataatagtatattgtttttctatttgagaatttctataaaaacaaaaacagaaaaacaatactcaaaaatgtaagaaaataataccttaatgtgattttttagataacttcttctattatttatattttttagtatattaagctaacaaaactatctaaatttaattgaaaagtaagttcttaatttttcttttatttcaaagcctcgtaccaattgatacttgttaagcagtctagtgtctttatatcatcacttggtatattatctgtcattatttaatctattactttccctacattaagtaaatttcagaaaagattttttcaggaaggctaatacagttttttgtgttcaatttccagaaatcatcataattataggctgttaaataaaaaaaaaccatagtaatacaatattattttctcttaactacaaaatttaagattctttttttttttatcttcaaccccagttgatgaatatatttatctaaataaattgtattttttagctttttattttgtgtcaacaaactatcactctcaattctctcattatcgcttattaatgcttctttctacagaacgcctatagttttgatcagtgaatacattagacctttttagtttatatatatatctttttttatttatttgtacatattatatatatacataaacatttatgttgtataaaagtaaatagattatcttcttatatcttattttctctcttttgaaaatttatgctctttttttatatatctagacattgcatatagaattattggcattataaaattttttgattaataaaaaacttttttaatatacaatgattataataattatttcaacaaatattccatacagcttaattattctgatacaacgttcatagatgtcaacttagtgtcttagcaatgcctttcatttgactgtcagtttggggtagttagtagaagacctaagtgatttgatgcgtaactcctctgtaaattctttataataagcactggcaaaacaaatatcacggtctgagacaattgtttgcggaaaaccatgatagcagaaaacataacgaaaaagtgctcttatgacaccaatagaaccataatttttatttattgcaataaagtgagcatgtttagaaaatctatcagcggcaaccataatcatatcattaccttgtttagttgtgagaacacctgtgacaaaatctattgaaatatcaattcattggctagccggaacatcgaaagttcgtaaattgctattcttttttgagcaatgtctcttcatcgattaacattaaagtcaacagttaataaaattcttgatttcttttgccattgaagataaatagtagtgaggaacgactctatgaattgtagcaatttcaccgaaatcactactttgtataaaactatcatgatataattataataaagtaaatccttctttctctggaacataaattctggagttgtagtacaaaatattattgtcaatcttataacattgttgtgccttggagaagtatttcattcttttgatatatttttgatttaaggacttatttgcagtagagatttcaaatttatcaacaactcttagggaaatgagaacaacagggggcctggattttccagtaagcaaccataccaatcttatggattaactgatgacaattcagttattggacaaatactaatagtagagatctcttaaggacgacttaatgcttccataataacgttgtttcttgttttgatatgttctatgtcgaatttgaattctcctaaatattgtaaccatcttgctaattgttcagatagttttttctttgtttggtacaaaagtatagaattatggtctgtgcataataagaagtcatgaccgtgtaagtaatatcgaaaattgttttagagattccccaatagcaagtaattctaatttgtcaatgtaataacaactttgggtatcagaaatactttttgagaaatatccaattactcctaataatttactagttggggacaaacgttctagaacacttcctatagcagcataattagcatcagtagttggacagtgataaccttcagtcacaaaaggaacgagaatgggtgcagtagtgagacaatcctttaatgtattcatagcatcttcttaagccttggaccaagcacactttttggagatgaaatcaaaaataggtccaactattttactgcaatgaggtatgaactttttgtaataattgactataccgataaatgattgtgcacttttgattgctttaggcatagataggtctcaaatagcttttattttatccttttggacagtaaaatcagcagcagataatgtatggctgagaaattgtacggtggattgtaggaagtaacatttattctttttgcaaactaaacatttttctataatcactttagggcttgtctgaggttgtggatatgtgtttctcaaattttattggcgataagggtatcatctgagtagacaaatacgtaaagtaaaccaccaagaatacgtcgcatatatttggaaaataaggctggagcattgcacaaatcaaatggcacaactttttaatgggaataatcgaatggtttagtaaaactagttagtttttcaaattttgtatctaacggaatttgatgttaacttgaataaaaattgagggtggagaaaacggaacagtcacctattttggctatcaaatcgtcgattttgggtagcagatatgggtctttgatggttatttcatttaactatctaaagtctatgactagtatataggatccatcttttctcttaactaataatagtgatgatgagatatacttccgccttctattatgaatactttatccaacagttcttgtataatcttcttgcattttttttttttctagtaacagtgttaaacggtaaggtggtagtcttagaggatgactatgtggctttaattcaattatgtggttgtaagtgtgtgtaccagtttttggaggtaatatatttgtaacagtgtccttaaattctcgtaattctaacggtaatttatggtgtggtttgtcagcagtggtttcattcttggatacttggactacgaaaatttcttctacatcagtatcgtaaatatgatctatggctcctacagtaatgtcagttgtaagattgcaattggtggtagtgttagtttccgacagtaattttgggtaatgttttatgattgggttatcacccatggtttgattttttaacagatgggttacacaagctttaaaattatagcttgttttgttttctatgaattcgcaatggacagcttgagtaatggtagaagtatatccagcaatagcgcctctctaaacaaatagtggaacattatagggcttataaccattgtttaggactaaatcttcattaactagtgatgtgggacttcctgtgccaaacaatacaggaactttgacattatttataaaacattgacgttcacgacgggtacctacgagtagatctgttttgttaatacttttgataatgatattgacttctggtatatctgtaacggcaaaggataatactttaggggacataatgatctctgttttcttgtatgctaatgtttttgctttttctggattttttgatttttattattttgaaaaaaatatttggaactaaaattggattagaaaacgaaagaaaaaaggtagatactggaattggaagtatacttgatttagctaaagctcgcatttagacaggagttagatcggtgacctggcttacagcaattgaaagataacttatattctaagcattagcaatgtaggtcttctttattatgtttgaaaatagcgtcataagatggttttgtgatagttgaattgtgagatctttctctccttgaagaacatggacaagcaggatatgtagaataacctctatgattacgttaggaagtgtgaatagctataacaatatcaccatcagcattgatcgtgaatgatgaagattcacatgaagcttcaattataaggttcagagaaataggatctaacagacagtgttcgcacctacaagctaactctgcagctttatatagtaaagttgaggtctgtaagataacagcccttatagtgtcaggttttaatcctttaataaaataactaattaatattggtacactcatcgcacctttgggtgacaagtttttatactgatagaattctctgatgtattcatcaatattgttgtgttgagccaaggaacaaattttacgattgacatcataagtgtctaattgggcactaaatgaggcagagaattgtgataccaaagtaaggtaaggtgtggtatggatatcgtaaccaacaggaaatttgagaaaccattaagtgattttatcgccaatatggtcagcgaaaatacagatcttacggaaatcatcagtaacatgatgaagatcaaattttatatctaaagataataaaaattaacgtaaggtatatactgaataagtagaacctgtaaatagttgggcgatcttaatggcctagatgaataccaaattagttggagtttcagatagggttaattttattatttgaccaagatgacgctaccagttgttgtccttgaagtaagatgctttactaaatggacagatataacaataatgtatatatataaagatattttctatagagaatgaaactgaatccaggttgttctttttttctaggcgataatatatatataattataaaccagatacgcctacaattctaaatactaaaataatggttatttacataaaaacgtgtggattaataattttcctaattagattctgtgatggttctcaattgtttttacaatctcctttgtccgtaattcaaaaataatcttttgtgtttacggactcttttgttttgaggaaatattttatatctttgcctgtgttagtattatttcatttagtaggttcaatattatttcatttaaacattcaatatgtcacttttagacaagcttaaagttttgagatttagatcagaacaatttaattacatgcattataagacttgaattacaaattttaaatcttaatattagagttaagtcataacattattataaaacgagtgactgagatgaagggtagaataaaatattatattaaaatctaattggttgggatagagtgataaccttttctagtcctatatatggacttcttctatacaaattatatataaaagataagtagaatatgattcttgtaaacatactaagtggtaaatctattttaatattctatttatttatatctgcattatttttttaattctttttatatataatctacgtgtattagttatattctatataagtaaattgaaagaaatattagaaaaagctgtaaatgtaatttggatgatacttagaggtgaacaagtagacgttatcaataaaaatgcggttaaaaccaataaagggagtgacttctcagaaataagtgagaataaattaatggttacaaagtggggatcatatataagggtaaagtgatgaatacaaagaaacaattttaaattttttctttgaatattttatgtaattgtattttatatttacatctatttatttctatattttagtatatgagaagttgaagaattttattaataataaatatattaataacttcagcaattgatcataactgccaatttcactaacatcttaaacacaactttttattagtattatatcttttcttcgtacattttttctcgttattcttctatttatttttttttttaatgcaaaaatcttccctaataaaaaataagtttactgtcaattaacagctctagaataataaagaagttagaaataatttgtttatcgaattaattaaacgaatatctgacatgttagttgtgtttattcggaaaatatattgatatggttaatctgaaaaattattttattttactcgggttaaaaatgaaaaaagtcaaaattttattattagataatacacaatctatatatagttatctatttaaataattattatattttaacattctccatttcaacttctgaatataataagtatctttttttttaacctttttactttttctttctccttattttatttttttcctgaatttaaaggaattttaaaatatactaatttatcaaactcaatttaactacaaaataatacaatattgttgataattagtgtttatatatattgggtagattgaatatgcttttaatcatgttatatatatatatttatgtagttaatagcataccaaattgaaataaatttcatgttttttcttctttatatataatacaataataatagtatagagaaaatccaaataaaattaaaaaatcgtataatatgaaaataactagctatatagagctgaatagtgagtaatttttctttatagatagtaaaaaattaattaaatacttttattaatgtctaatgatatttgaatagtaaatacttgattttttattgtttggtatcagctaatatttcattgtcttatttaattcatctttgaatatcctatttcagcagtatttaaatttaataaatatgtaaacctataggtaattgttgagtattatggtgtaccaccagtccaatcataagtttattgcctcatatatgatattgaaaatgattaataaatttccaaatgttgataattatatgaaatattatttaagatatttttgataattaaccaacaaactagaaataaatatcccagttatgtacattttatttattaattttatgaggtaattcttaccatttgaaaaaaaaatttaataaataataaaacataatgactattatttaattccaaataattttaaacaagaaaatttaaatttacactaattaatacaatttattcattttcataaaataattttcacactttattatcacagaattttgtatcataaatacggttttctagaaataattgttacgtatttccataatttatgttttaattaaaaaaaagaaactcttagtatcaataagcaatgtctcattttctgatatatggcatatatccttaattttctaccctaaaggaaataccgatcttttagtcctagattaaaaacattcgaatattcaaacattagtattgataatcacttgtaattatctctgttgctttggaatataaatagggtgtttacaatgtctccaaagaataccctaataatgaataaaagaaaaaaatctatccaaaatgccaaattactataccaaaataattgacctttatcaagttaaatctcttatgttatagagaatttacaaatattttatataactgatttcattatccatatatattataggtctaagataatattttctttatatataattttataagtctctataatcatttttataaatacaaacttctcttctcatcaaacttcatataactacttaccttaaattgttcatcacaagaaataactcaacaagaatctgcaaaatacctttaagggtatgcattgatacacaagtctcataattataataaccaatgtcaatattttacagtactcttattaacatatattctcctctaagtttttgcaagcaaacgtccatgcactaattcatagctccctagtaaccctcttaagtgacacagagctgcaattacaacaaaaatatggaataattgatgtgaatgaccccaaaaatcatatttacctggatgaagtttctcaggaaatctaattccatataagaaagcaccaaaaatatagaagataccttccaatataacccatgaaagttgaactctcttccaagcttctgcaaaaccatagtaataaataccagccaatattggtaatacagccgataaaccaaagacaacaaataatgtagctctataaggtctccattccctagatctaaaaacgtctctagaggacacaacagcacaaaccataccaagaaacaatgtaagacttgtaaaaaaatagaaaaagtacaaattgtcataaaatccatagtacaaaatacttatcatcgaactaacaattaagacaactattccaatataatctagtttattaccaaacacagcaacttctaatgaatgacttttaaagcaatgaaaaatactacttaaaattagacacacaaaagcaccaaaaaggaaaagatcaataaaaaaataatctataatcgtagttgttacaaagtatttcacacaatatctattaaaaaatatggtaaaaagaaaacaaacaccaggaataaaatgagaatatatattaactgtctcattatgaagaaagaataaactttcaatacagtccttaaaatttctagtttctttgacgtatcctttaagaatatgttcattatctttttgccaatctggtatttctccccatgtataaagtttctttgttattttttttgtgactaacttctcatcattcctcgagacttcctctacctctaatacggtttgctttgttactcgtaaactcattgtgcactaattattttcgagaatataattgacctctacagtattggacaaggagttcgtctttttactaattcaaaaaaatctaaacatgtaatcaaataaattagccactcttattattttatcctttttaagaacagattaaaacataaatattcttatccatgactatcaaatcatgatatatacaaaagataataaaaaaaactcttttataacaaaactttgaaacaccataaactcttgctatgtgttgcataaattgctgtatttttcaacaattttttctctaaattgtctcgacatactcttaaagctatatttcaaaaaaaaaaaattcaacaattttctgcagtttaaaaactgtaaaatatccaaaacatcattcgtaagaagtttattattctaaaaacagaattccaaaaacaattacacaagaaataaaatttacatgaaagcttcccttctttgtttaacaccgtacttatttccccgatctataattaacatttttaggaacaataactgcataaattattgcaatgatttttagaaactagggaagataactcaacatttataaacatcacatctgtaaccttttcataataaagatacatctacttgatcgaaacataacagtattacaagagatttgaaagttgtgtagttatttactatatttgaactttctgtttaaaaatactatatcgtactctgcattaattgttttaagataacacgtaatacaatctatactaaaaaattaaaaagaatgtaatcaagactactgctacagggatcaatattcttcaaaaatactagtaagattaatcagggtttaatcagtatttgaagaaatatgactttcaaatattaatcaacattttgttattactctgtctacgatatatttttaataatagtattatcaactaaaaaaaatccaatattctaatcaaggtattaattaaacaaaccttatttattataagattattgctataatctcatttttttgttttatattctaaaaatggaattaaaaacacatttccacttaatataattataaaaagcttaattattcatgcataaattcattcaatatagtgatctattcgaactcaccaaaaaaaaaacatcaagtaaaaaattataagtaaaaccaattcaatttcagttcggcattataagtctccataattatcatatacatctctccaattattatagaaacctttaaaaaaccttatacccaaaccgacatccttagaaccagtagtggcacgaatactgtgcatcgctaattgaggaatacccaaatcaattgtacgagcacctgtttgtgatgcaatggaaggcccaatagtaccaccagatctggaattattcttgatttgaaaatactgcattttatctccattctttcttgctaattcttcaacgaatgcaagcccaactacatcagtggccatatgagcatttgggtctaatgaaatagccacaccaacattaggtttaggtgaatggtttttcatataaacttccttaaaattaggattgaatagatgattaacatccgctgacaaaataatagaattagcaaaaacagtacgaaggttgttgaatttggttccaaatcttgctgaagcaaccttttcaattgcagattccattaaccacccctttgcaccctgacgggttaatgatccaacttcttcattatcaaataatccaaggagagtgaaattgtctgaactatctatagtaaccgtttttgaaagcaaaactaatgcccacaaggctgcaaaactacatagtctgtcatcaagtcttggtgcaaataggaactcattgtttaatcctcctaaactacctttttgaacatcaaataagtctaaatccaattgaacaatttgagaaaccttaatgccagcgatctttgcaatatatcttaatagatgaatcgaatgcttgccaattaaaggacatttagattcctcttctgatatttggatatcgtcttccttttccaaatagtggaatccaataacaggaactgcttgatcttctttatcaaatggaccttctgcagatttgccaaaatggggtgctaaagaaggaattttggcaataggagatggcgttgaatttataagaatacttttgatcttattatccttttcatttttgaataaaacacaccccccaacaccaagatctctatcaaaccataaatgattcaatgtaccaccataaggtgctactcctaataattcatagccttccacactttccttaatagaagctggtttcaatttggcagctaaagcatctacatgacatccgatagcaccgacacctctagtttcttcccagtctttaccaataataaatgccactaaacttgtaccgtttcttattgtaaaatatttaccaacattaatcttatcattccaattttccttttctgataaataaataaacccattttctttcaaaacctgcgaagcataatcaataacatgatatgttgttggattgttatatgtaaaatcaataaatttttgagaaaatttcactaactcatcatcgttatatatgtctatattaatattttcaccactaatattgtcaccaatcaagccgtttttaaattcttgattttcaactgacaaggcttgtaaagcatttttcaattgcttgattaattgcaattggtaggtacgagtatccatggaatccatcagagaaatactaccgtcaattatgatctaaattatccagttacctttctagcaaccaaattagatggctgcaaagaacaaaaaaatacctaaggtgaagttgttagttttgaatttgctcattaatcatattacacacttacccctttcaatttttatactgactacaaattgaaacccttttatttttttctacttttttaaactttcacccccgaaagataaagaaaaattcaacgaagagataaaaaagacgcttgataagaaatgagaaataaaagaattgaaaaaagacttagttatgtgttttatttttatccaaataaacaatactacatatctaactaaaaaacgataaatattttcaattacagctatgatattaacagcaaagtacacatccacacacccacatacatatcaagttaagacagttaccatttcaaaaccaccatttgtttcttaccttttttaactatagaatctctaactatttgaagaatttcatcatcagacatcgtatttgtatcccatgtcactgtctctatttcgtcctttggtgatctaatataaccattttcaaataacttagtaaattctttaacagattcacgtttcatctctggattcttcttattcaatgctgtaacccaaaaacctgccgaagtcaaccccttaaaaatatgtaatgacgttggtaatatgactggttgctttgacatacctccgtatgtcagcattagtgcattattttccaattttcttgcaatggaagaactagatttcccacccacagaattcaaagctagtctaactcttgaattagcccctaatattttaggtaattcatgtctactaaacaactcatcattgttttgtgtctctgaaataaccttcgtagctttaaatttatgttccaaggtattggcaacactatcaaaatcatctctatctctaatgacactcaatgttttgataccctttgctttagcaatctgagtgaccaatttagatacaattgatgtacctgcattttgaataatccattcattacctgagggatcccaatcaacataattattaactaactgatatgcagtgacaccattaacagaaacagttgcggcagtaaaaaaatctaaagagtttactttaatcaagtcagctggatttttaaatactctataatttgaccatgtcccctgatttgcttgtaatggaataacccagtcacctagcttcaaatcttcaacattatcagacgcagatccatttttagggacatgaatcacttcaaataacccttcatttcctgcaattgcagaaggttctttagtttcataatttaaagttttttcaggtaaagatgggtatacaccttgtaattggttgatatcggatggattaattggaaaggctaaagtacgtaaaactatagaatcctctaaattttcctttggggtataattctgtatcgatagtacctttgttggatcctcagcattatgtgacgaatatataatagacttaaaagtctttggtatttgagtagaaattgaacttttaaaagttggcaaaaccattgcttaataataataatatttttgaatttatctcttcacatacacacaaacaaaaaaagaaaatcaaagattgttacaaatatatgagcttagttatatattatgtaaaataaattcttttcttatgtcaaacaataatgagttagaagttatctgagtatctagttttttttaaaaaaaaagggaagtaaacgtggatatgtatagttacatgggggggtttattaacgagcaccttttataacgttgaagaacttgatatataccattaatatttaacatgttttccttgtcttacagttactttcttccaattgcaatattaatttttattggtggctgcgccacaatacaacaattctcattgtgtgtgcttactaatcccttcttccttcaatcagctttcataaccacatttttgagaatttcatgcctgtcatcccaccttctcacaacaaactttcatcacccctttcttttgttttttttttaccctaaatattctttctctctttctctcccccctttttttttcttttctggaaacaaaactgaacttctaggatttatatataaattttctttttttactttcccatattgagcaaaacgttaggtcactggctccttttacatttttattgttcatcttcttttacatcaaatgtggcgagacaacaattaatcgcaatgatataaaattaaagtaaattgatatgatatatatatatagttagatatatatgtgtgtctaggacggaatagtggagtctctattctttttctattctttcttttcataagaaaaaaaacattaatatctagtcttagatacaactagagcatttccaaatcgaaacagcgatggcccattccttgaaacagttcaatttatactaatgaaaattaaagggaaaaaaaaaacaaatccagaatgcatttatttagtctaagtgtcttcaaatgaaaccgatgaatatgaatatatttatgtgtaataaaaatataaaatgactcgactctcatttacccattttcattttcatttcttcttgttcttcctttatttttttcatcgttgtttcctctcttatttaattattaacaagcaaagctttttttcatcaattttatgagctctattcattattttagctttctggtcattaaaagcaaataaataatttctttttcgttattaatctactttaataatcgatgatttttgttttaatgcctctttaattaattgtaatttttccattaaattactctctgggaaatttggtatagtaccatatttcaaaacttcaactaatgggtaagtgaaactttcatgtgatggtgaaatgtatgtaataagcttaccaccctctgagatggctaacttatgatggtccttgaaattgaattgaaaagtaccatcacttagttcaaacataacaaacgtcttatatcttgtataccttcttaaaaatacatcatctttgtgatattcttctctaccaaatgttgaaactctacttaaattagccttcatatattttgcaaaaaaatccactatgtccaaatgccttgctaattcctctggtctttctgataaaagataatgacttgctacccacccctcagtttgatcataacttatataccaaaattcttcagcatctgccaaacgtaaaactgtagaaccattattgaataagacaccaatatcctctgtagaaagttgataagaaaacccgtgtttattagaataatccacccatttagtcacaatcatcggatgtttgatttcagggagtctagactggggtaaaccacccatctttttctgtgcttctgcttctaatataccattcaatgttaaatgacattcactggctaaaattctcaatgaaatttccgaattaatcacatttgtagaactggctactaagctctttctaattgtatattgttgtgctctacgtaaccttgattcacgagctaaatcattcaatcttctttgagtctctaagtcaacaacctcttggtatttattctttgttccacctggcgatagtgatttgggcaggatggtggtttgagaattttgattataggattgttcatctgttaattgttgaatagcatgttttttccaattttcatttaggtttctatccaacaaacccgatttttccatgcaatttctgaaatttacatatgattcttctagagttagaatatcttcataattaggtctcctctccatcacattttctctagtagaaggtggaaaaattcccctaaaccatacatactctattatttcatcaatagaaggtctttctattggatcaatagataaaatatcttggattaaaatttttgcttctgcagacacatatttttctgctggaaaatggaaatctctgtttttaatcctttcataaatagtattgacatctttagactgaaaaggtggtttaccaactaacaaagcatagagcatcacaccaattgaccaaatatctacctcaaatgaatgacctgaatgtttccctaaaagcacctcaggggcaatataattgggtgtaccacaaacagtatattttctttctctatcattcgccaatacagcggctaaaccaaaatcaccaatttttaaattataatccttatcgaaaaaaatatttcccaattttaaatctctatgaataactcttcttgaatgcatatatttaacagcaccacaaatttgtgttataaaaaatctcgcttcaggctcagtgatgtgtcttcttgcctttaacaattccatcaatgacccatttggacatatttctaaaagtatataaacatttgtgtcatcttcaaaacaatcaataaattgcacaatattcatatgtttcatacttttatgaatttgaatctctgataacaatttcttccttgtcttctcagatttaattgagatcttagcaactgttttggcagcatatatcttcccactatcatccttcatctgaaaacaacgagcaaacccaccttcccctagaaaatgccctctatgataatcacgacctctggtttttatcaaagatggtggtgttttacaaagggcggataatttttctttcttttttctttgttgtggttgttgtggttgtagttgttgatgttgttggtaaccatttggatcctgtcttttattgtaactattgatataattttctttattttgtatgtctacatgaggaccctttgttggcgtctttaaagaacgggtattcaattgtctttcattgacagcttgtaatggtgctaaagacatgacagatctagtgtaatcgataacaatccactaaataaaaaaatatttttgaatcaactaatgtgttattaatagtaataataaagacaacaagaaaatcaatatcgatggtaataaccctcactaaaagtaatgataaaggattgatagagtattaaatccctgacaatatatttgtaacccctgaaaataaagatgtgctaaacacaaattaagatatgctctgtatatgtatttgattgtctttgctgagaatatctaataagataaatcacaaagccaatcctttcgaataatgaaaaggacaattttgaggatgaggatgtaaactattttagttcaagtcaacaaccacttcttcaaaacttttaaagtaaagaagtagagaatcaaacttataattttatgaaacagtatctttagaaatgtttcaactttgtgatctaaattttcactttgtgtatctaatttgctactttttgattttcttttgcttttttttttttgtttttttttgttgtaattattttcaatgttgacatttttcctaaaagggctttacatacttttttagatttttcccatttaggaaatactataaataaatcattgatccctttcttaaaaaaattctcaagaaatattctggggttcgaatctgctagtaggcccacagcaacaaattaggatttattttattgactaataattataaatctagatagttaataataaagagtgctcaagaggaattaatagaagggatcttctattaagtaactaagttatttcaagattatgaattttgaagagtatatcgtagtaactccgaattcaaatgcaaatgaacaaactgaaaccctaaccatatataaaaatatattaaaaaatagataaaaattctttttgtacctgtattatattaccttataattatgtgatataattagcctccttcctccattattacagtcggacattatatgattctttactagtatgcattcctctttaaaatgaaaaagcatagaaagaaccaggttagaaaaacagattaaaaccaacagaaacaacaactattaaagataaaaatagccacattaatttctaaaaataacacacaagaaaaaaaaaacagatcagaataaaatcactaaaaacggaaggataatgttatcaaaagtttttccttggccaagtgcttccaggcatttacttttcccacttaggaaagtactgtacattccatttttttaattctcatgtttcgaagttgcatacgttgccaattaatcagttaatccaactttctttccttcttttcttgtatccttcttgatctcattcatattataaaaattatatttatttttccaaatgtttatatacacagttgttaccttacacacaaatagcaacttttccctttggatttgcaacgattatcgactatataaaaaaggagaagtagttttgttgtattttatttttattcatctgatatttccatacgttcggtgctaaaattgtcttattttggaagaaattttttcaggtaccaacgaggaggacaacaatatataattaggactagtacaaataggtcaacatgtgtggtatctttggttattgtaactatttagttgaaaaatcaagaggtgatattatagattaccttgttgaaggtttggaaagattagaatatagaggttatgactccactggtattgctattgatggtgatgaacctgactcaactataatcattaaacaaattggtaaagtaaaagcgttaaaaaaggaaattgaaaaatacaaccctgacagagaagttacatttgtctctcatgttgggatagctcatacaagatgggcaacacatggtcaaccaaaacaaatcaactgtcatcctcaatcctctgataaaaataatgaatttgtaattgtccataatggtatcattacaaattttagagaactgaagactttgttagtgaataaaggttacaaatttgaaagtgaaactgacacagaatgtattgccaaactattcaaacatatctatgataccaatatgcaaaatggaaatgaattagaattccatgaattgacaaagttggttctattggaattagaaggatcttatggtctattatgtagatcttctcattatccaaacgaagttattgctactagaaagggttctccattgctaattggtgttaagtctgaaaaaaaattaaaaatggattttgttgatattgaatttccagatgaagatcaaccagagacaccaatctcacaggatgataataaaatatccttaacaaataacaaaaagaacccatctgcatttatttccaatgatcatcactctaaccgtgataatcttttaccaattgccactaatgagttcaatttgagacattcacaatccagagccttcttatccgaggacggattccctgctcctatcgagtttttcttgtcctcagatgcatcttcggtcatcaaacacaccaagaaggttctcttcttagaggacgacgacattgcacacatctacgatggggagttgcacatccacagatcgagacgtgaagtaggggtgccaatgaccagatcgattcagacattggagatggaattagcacagatcatgaagggtccatacaaacacttcatgcagaaggaaatctttgaacaaccagaatctacgttgaacaccatgagaggccgtattgatttcgaaaataatacagtgctactgggtgggctgaccgcatggctgccagcgatcagacgcgcccgtaggttgatcatgattgcgtgcggtacatcataccactcatgcctagctacaagagcaatctttgaggaattgtcagagattccggtaagcattgagttggcatcagacttcttggacagaaagacaccggtgttcagagacgatatctgtgtatttgtgtcgcaaagtggtgagacagcagacactatactggcattaaactactgcttagagaggggggcgttgacagttggtattgtgaacacagtggggtcatcgctttccagagcaacacactgtggtgtacatatcaatgcagggccagaaatcggggttgcgtcgacaaaagcatacacgtcccaatacattgcactagtgatgtttgcactttcgctatccgatgacagggtgtcgaaacaggagagaagggtggagattatacaaggattgaggaagattcctgaacagatcaaggaggtgctagcactagagccccggatcaaggagttgtgtgagacgcaattgaagaaccagaagtcactactactgttaggtagaggctaccagtttgcctcggcactagaaggggcgttgaaaatcaaggaaatttcgtacatgcactcggagggtgttcttgcaggggaattgaagcatggagtgttggcgctggttgatgagaatttacctattattgcctttgggactagggactcattgttccccaaggttgtttcgtcgattgaacaggtgacagccagaaagggtcaccctatcattatctgtaacgagggagacgcagtgtggagcaagaaggcgaccacgagcaacttgattacgctggaagtaccacaaacggtggattgcctgcaagggttgttgaatattattccattacaattaatgtcatactggctagccgtgaacaagggtattgatgttgatttcccaagaaacttagccaagtctgtaacagttgagtgagacctctctttcctattttttcaaaaaaacctaatgtattatattcatcaattttaggtcaacccctaaatattagaaataaattttcatgtgtaaaaaacttccttatttctaactcaatataagatacgtatattatatatttatctctttatatgttgtcaacagtattgtattccaattattaactcactaattttataatttatttctttttcaaattatatagaaataaaatcttttggtctctagatactggatacagcggctaaatattatctctccaagatatatgcacatcaacatatataaatatttaaacatcaattaataagtttaaaaaaacaaagagagtacttttctaaagatgattttttaaaataaaaataaaggtgtattgcaaatacatcaacctcaaaagaaatgaatccaaaaaatagagagaaatatggttgtcaaaaagttttaaagacaaaacaaaacagatataaaactaaaagatacataaactctttttttgaaatcccatttaaaaaatcaactcaaagattaattcaaaaaggaaaagatagcctattttatatggcacataattttattttaaaaatgaacaaagaatacgagaatcaatcagatgctattaatcaacataatattttaagggatccattggaatcacgtcagacaatatataaggaaaatatatacaagcaaagggatcaatcaaaaaatatcattttttctggagacatattcaacagacaaaggaaaataattcaatgtcagaataaaattgatttacaattaaaagaaattaaaaaattagaagaaacaagtcttggacgttaatcaatattactaaagcataaaattgtgacacaaaaaaaagtaagatatattatgcaactattatttaagtctatctatcaatttatctatctatctatacatatgaaaaattaaaataaatggtgaaaaaagttattacagtaaccttggttaaatggtctaaaatggaaacatttatatgtatgcatatacgtacttcagggtaaagacataaaaaatttaaagtttagctacttcatatagagcttcagaaacataatcaatatttgaatcattgatgccacttaaagacaacctaccatcatcagtcaaataaattgcatatttgtttcttaaatggtgaacctgctttaaagtaaatctggtgaaataaaacataccatgttgtctttcaaaatcaatcaaatcatgccattttaaattattaaataaatttaaccgaataatttttaaccgattaaccatattttgaacatcattaaaccactgtaattttaaatctttatttaacaacacttgattagctacatgagaaccataaccaggtggagaagaataaaatgatcttatgattggtttcaactgagagtcaatatttaagttagtattagagttggaattcaatggagtcacaatgctcaaagaacctactctttcaccataaagacccatgtttttggcaaaggattgacaaagataaagtccatttggccaatcacccttacttaaacaggttcttaacagataagcatcatcgatcaaatttccagattctaaaccctgataagccatatcgataattgggaccatatttaattcatatattgtatttatgatagtcttccattgttcttttgttggatcaataccagtagggttatgacaacatgcatgtaaaaggatgcattgtggagaggtaatatcagtttgagaacggtttaattttagattgcttaaccactcatcaacggatatcgtaccattcgaatcatcataataattatagggtttaatatattgaaaaccattttccttaaagatatttaaatgattcgaccaagaataatttggtacccaaattgtctttgaaataaattttgacaaaaattttgcagcaagtgcaacagcaccagtaccacttaaagtttgcacaaaattaattttatcattcaaaagataattgtgagctaaaccctgacatgaatcgttccaaatgaaatccaacacattctttgagtaatcctgattaccatttattggcagataagttaaactctggaaactttgataattcttgttcactaagtcttgagcccttttaacagatgggaatgttgcaactttaccaaaattatctttatatataccaacagttaaattaacttttttagggtttgcatctttattaaatatatcagttaaacctaagattctatctggtggagccgattcaatcttatttaataatgaggtggatttaaatctagctgttaaatgaattatgacctttttagtattgttattagtcagatggtgatgatagcgtgagttcatattaaacctatacaacaaaccatcaagttttaccataaacattatcattgcttcctttctttttttcctttcctactttcttttttgttgtaactcaataatgagtaaatatacctgcatctacgtatatatatatatatagggcaatatttaataaggcatagaaatagatatagcaaacttattgaatattcattatatgtggaaaactatataataaaatagacgcaaaaggtaggaacttatatacgctcatatttaagatcacttgttttaaacaaaggtctaataacataaagttaaacatcatagatatacaaagataccaagatatcctttatgtgagtttattttgtcatgcatataggaagatcaggaagtacatgaggttaattgtttatcctatttctttttttttgctctcaatgtctttaattcccataataataatagttctaatcttattaagctctagcctcatcatatattaattctgtattgagtaaaaaataaacaagcaagaaccatcatgttctcctctctattgcatttccccccttcaaaatatgccgcatacattttttattatattaccattattaacacgtcactatagttaataatgtatgactctctttctctttctctcgttcttttttgtttctttttcttcctttcgatttgactgaagaaattttcaaaacgtcatgaaatttgtctgctgaaaaaaaccaaagagaaaaaagaaaaaaaattagtgagatggagggaaggaaagtgttttttttcttttgcttctgctttcttagtcacacaaaattagataatgacagcgacaccgctgtttttaacattaataataaagaagagggaaaagaaaagttctttaccttctttcgttcctactccctttcacaagtgtgccataagtatgtagaattcacagtgtagatgtgggagtatcggacttctatctgtgttgctttataagttgccttatctttgtcctttatttagttagggctttgactagccaaaagaaaaaaaaaagtagaaaagagaaaaacattatgatatgaatacttaacattacaactggtgtaggctggaatactaaatattataaggagattagaatatcaaaatgttctgtgcttttaaactactcttgtttgtctgcaatatatcctttaagttttacattcttgatgaggctcttatgagaagtacaacctagatatttattataatttttagaatgttgtcaatatttgtccagattattttaaagcaatttgataatcacttgatatagagagtctcagccattttctagccttttaaatacctactactcactaaaaaaaaattaaacaactctaagaagtattatggtccttttaatcattattgaaggttatacttgattaaagtgaggttttaataacaatattagtgactttctgttccattgattaaatgatgacaaaaaataatattaatgtagaaacaaaagaacatgcaagcagattgagtaactatctttctatgacgtattaaaacagaaatataggctttggttacgtgttatacatataaactagtatattcaatttcacttcggtttaaaaaattcgtatctatcagcctatttttgtataacaaaatttcttttatgaacatataagcaagttcctttttttttataatttttttttttgcctgaagtaataacaaaatgttctcataatcatgaaatgagatagagacatagttagaaaaaaaaagttattattaaaagtcttacataaatcaacctaaatactctaactcattgtacatctgtcgatggttactgtatgagctgataatatatttttcttttcaaacataaatataattctcttcgtcatccctatatatgtttgtcctatctttcccctctcatttttattcactattttaaaatagaaaaaatagcaataattatattaatagtagaaaaataataaaacaataattgattcgttatatccaaatgatcaatactcaaaggtaatataaattaataaaataattaatcaccaataactaggtcagccattcaaataaaataaaacaacaaaaataaatactcctaaccctttattaattttgttatttttttaataatgtgaagatacaatgctgatatatttatgcctaatacattttctttgctttacttcaataatattattcctttctatattttcattactatactgaaatatggaaataattaactttttaaaaaacaaaaggatattagggtataatattgtggtcgaagattaattctattatttatgaaggcttgttttatctcgagaaaatttgcatatatttgtttgcttctcaatatctcgagacttgatatattaacttgatagaatattaaaatcacccaaaatgttatctgtgtattcatcctttctctgttcaacatcttcataataagaaaaagaaaaagagtagaaacgctaaaataaaaatttaattagtaacatcatttaactactaatatagcatataacatatcgtgatgtgtggtatcttcggttattgtaattattgggttgaaaaaacaagaggtgagattttggatactctcactgaaggtttagagaaattagaatacagaggttatgattcagccggtctagcaatagactctactttaataattaaacaaatcggtaaagtggatgctttgaaaaaagagattagtaaaattagtttggatttgaatgatatttttgtctctcatgttgggatagctcatacaagatgggcaacacatggtcaaccaaaacaaatcaactgtcatcctcaatcctctgataaaaataatgaatttgtaattgtccataatggtatcattacaaattttagagaactgaagactttgttagtgaataaaggttacaaatttgaaagtgaaactgacacagaatgtattgccaaactattcaaacatatctatgataccaatatgcaaaatggaaatgaattagaattccatgaattgacaaagttggttctattggaattagaaggatcttatggtctattatgtagatcttctcattatccaaacgaagttattgctactagaaagggttctccattgctaattggtgttaagtctgaaaaaaaattaaaaatggattttatagatgtcgaatatcctgaggagaataataataataactataatcataacaaatatagttattttgaatctaattgtaagaatggtaacaagagtgctgaacttgatagaattgatgacaatttggaggtttttgaagattatatcttaccagatatgaaaacacaagatatatctaggccaaataataatgaatctccctctagtttcatttgtaatgataaaagatcaaattgtagcaatcttttaccaattgccactaatgagttcaatttgagacattcacaatccagagccttcttatccgaggacggattccctgctcctatcgagtttttcttgtcctcagatgcatcttcggtcatcaaacacaccaagaaggttctcttcttagaggacgacgacattgcacacatctacgatggggagttgcacatccacagatcgagacgtgaagtaggggtgccaatgaccagatcgattcagacattggagatggaattagcacagatcatgaagggtccatacaaacacttcatgcagaaggaaatctttgaacaaccagaatctacgttgaacaccatgagaggccgtattgatttcgaaaataatacagtgctactgggtgggctgaccgcatggctgccagcgatcagacgcgcccgtaggttgatcatgattgcgtgcggtacatcataccactcatgcctagctacaagagcaatctttgaggaattgtcagagattccggtaagcattgagttggcatcagacttcttggacagaaagacaccggtgttcagagacgatatctgtgtatttgtgtcgcaaagtggtgagacagcagacactatactggcattaaactactgcttagagaggggggcgttgacagttggtattgtgaacacagtggggtcatcgctttccagagcaacacactgtggtgtacatatcaatgcagggccagaaatcggggttgcgtcgacaaaagcatacacgtcccaatacattgcactagtgatgtttgcactttcgctatccgatgacagggtgtcgaaacaggagagaagggtggagattatacaaggattgaggaagattcctgaacagatcaaggaggtgctagcactagagccccggatcaaggagttgtgtgagacgcaattgaagaaccagaagtcactactactgttaggtagaggctaccagtttgcctcggcactagaaggggcgttgaaaatcaaggaaatttcgtacatgcactcggagggtgttcttgcaggggaattgaagcatggagtgttggcgctggttgatgagaatttacctattattgcctttgggactagggactcattgttccccaaggttgtttcgtcgattgaacaggtgacagccagaaagggtcaccctatcattatctgtaacgagggagacgcagtgtggagcaagaaggcgaccacgagcaacttgattacgctggaagtaccacaaacggtggattgcctgcaagggttgttgaatattattccattacaattaatgtcatactggctagccgtgaacaagggtattgatgttgatttcccaagaaacttagccaagtctgtgacagttgaataaatactattaaattcctttctttttattttttttactttaaatgctattatataattgattagtttcttttaaaattttaatataaagatactttgacatatgtttttttatattttgatgtcttagttattattttgactaatttaacttaggattttataaataaataattatgatgtatttatgcaaatagtaaaggattatatatatacggaaattctccttattgtgtagtaaaaaaatattataacagtttttatcctttctaaaatttatattatccaaactcatcctttttatttcatactaactaagtaaatatatcttttaatgaatttaaatacaggatatttaaataatgatgctgattggttgatagattgaaacacgtcattagataataagtgatttagattttttttttatatatggttagatggaaggtaccaaatttaattaaaatagtattaaatcctgattaattatttatttactatattttgacaaactagatgatcgaatcctgtctaaatacaatccacatacaataggataatgctttttgtataaaactttaaaaaaagaaaacaaacatgtaaaaaacatagttctattagagacaagagctactaaaaataccattatttaagctctaaatagtagacaaagataagaataatttttaaggataaaatttaaacatatttacatactaattcattttttttctcacaaatactctctatatatagactttaattatttttctattcattactaagtacattagtttcgagtatgatattaatcttaaaagaagaaacgggcaaaaatagctgcttgtttatcatattttaacaaatgtcctaactttctaatattaatgttatagaaaaatattctttttttcaataaagccctattgttaataaggtgcattcgattctttttctgctctactttttcccctgatttgtagggagagtttagattgatatattgtaggtaaacggaaataaaatatgacacataggaataaaaaaaagggaaagaatgtatccaaagatataagtgaggaagttacataataattgattgtactcttactgtttgatgggagaaggataaaacacgtcgacagtgtaaattaaacaacaataatataatagaaaaatatgtcagaaataaaaaatttcacaattggtgtcataggtgcacacggaagaacaggctcattaactttaaaaaccttacaaaaacatggatttaagaaaattatagcatttacaagaaatattattgatactaaaaataacatatcatatgatcctactgttgttgaacaaattcatttagatttaattaacttctctgtgcttgaattagttgaattgtttaaaaaggttgatataattatctttgttgcaggatctggccatcaaagtctacgagaattatttactgttgatattgatggtgtctctaaatgtgtagaggcatccgagatagcaaatattcaaagatttatattgatttcagttattaatgtagaagaaagagacttttggtggtcattagaaggtaatttaagagactattttatagctaaaagatgtgcagaccgtaaggtcagaaattcaaaattaaagtggacaattctacaaccaggatggttgacagctaataataaaccaacaggaaagattcaaccagttgaaaggattgaagaacaaaaaactaatggatatacaattgagagggaagatctagctgaagttattgtttcatgtattttaaatccaacaactacatgtatgaggagtataccattgtcaaatggtgatactaaaattgaagaggtactcaaaaatttgcattagttactgaactctaacgttatatataaatatttcaccctaatcatatttgtgctacatatatataaattcattggtattcgtgtaaatattctttatccaaaatttattattattctatttatacttctgtattttaaaattttctattattatattttttccggtagctattttttttatttctactaggaagtttgagtcttctaaagttattacttaccaaattatatttctttttacgcttctgttttacagggactttagtagtgtcctgttttttgtcaatacctttaaccgtttctttatttagtctgacatcttctaagagtaatttatcgtttatcgttggtggtaagggaattgactttttttcaataaactctttcaatttttgtcttttaatatttcttaacatagcgtgtaaatcaacctcttcattgatattattatttaatgaatcattagctgacatatccacattagccataactctgttttttcgtcttctttgggttctagcatcggtaggaacgttgttaaaagaagtctctgtatttatttcttctatgttattgactttcttaccttgagtattagaaatctctttatcattcttaataccagaatcagacagtatgtccttattatttttctcgtcgtcttcattttgctcttcctctgtctcctcttcaatttcagtaagtttgagctcttttctcacagtttgaaattcatgttccagttcctttaaagatttagtcaaagagcgtttccacaagggagaagggctaataccaacaggtgtaatattttcatttaactctacgtttaaatttcttttaggagtcctttgacgatattttattgtggagtcgatctttaatggagaattagggccatataatcttgtagatatatcattttttaaaccactatgatcattacttttattgttgttcttaagtataggtgctgtattattttctagtacattctcaattttgtctatatttgattcttggaatatatcatcattttcatcatcttctaataaatctaattttttctttataggagatagatttatttcgaatagaccaatagatttaccatgaatctgcggagtaggacccaattcttcattaataaatccattaaagtcatcttcattgttattactaatatttgaaaaatttccacctgtagaattgtctactgaatattcattttttataggtgttctctcatatcgtacttttttactcttatatcttgaataacttttatattttactttaattgcaggaaattgatcaatatcactctttttgggtgatctgttatatttcttgataaaatcatgttcccattttttaagttctttcttcaataatataatgttcatgccgaaaaattcatcttcatgaggtttaagtatagtgtatgcttcattagttattgataacatcagcagaactttctttttgggtgtactatcttattgtatttatttatttcaaatttgtactgtgtagtaaaaattctttagtaagaaaaaaaaaaagagacaaaagaaaaacagacacaggattaatttactagtaagttgatgagtttattgccgattgagagaactcatgctgtctccttgtgcaaaacatactaaaaagaaattgagaagatccaagagtttcaaaaaagatgtactaatatattttcgaattgaattatttaagtaaatatataaatatatatattaatgaataataaataaggtaaaattatacaataattatgtaaatcaaaccatgacgttatgaaataaattagtaaatgcgagaagacactcccaaatatgtgaatgaaatcacctttatattacgttttgtgtaccagttggacacagagagcttttgtccaactgctcgaaaatcgttatcatcaaatatgtggtaaaaattgaagggaaccaaaggcaaacttaaaatgcatcaaataaaaaaatgtaatagcttactgattactatgaaggaaattagttcattttatttctttttttttactatcccagttaattctatggcaaatcctgcaaggaaaaactgaaattgttaaaaccattaaaattgttatcttgctcatccatcaactcttctaaagtcggtgcagaatagaaatatgaatcaatatcattggctgcaggattagttaaactgtttttattgctattggaattataattgttagcattttcattgttgttgacactgtcttctttattaccattagtatctgcagtatcatttacggtcttattataacgtggcaaaaatttccaaatgttattatatatttcattctctaattcatcattggtagttttctcaataaaaccatcattattttccggattcttgatgttatcacgagaacttggatttgatgcaaacgatgaaaggagtgtagatgacatattataattgtaatctatattgaactcctggaatatgccgttgttacttacagaactaatattttcattgttaaaggtgaaagtatgtaacttattaagagaagtacccatatcatttaatggagtagtcataacagtttcagtcggggagggctctctttgaagtgcagtactagtactactaatagtactgactgcggaacttactgctgtagtctttacagcattcttatcagaagatgaaacaactgagaaattatttggggtgactgaagttgcagcatgttcattatgtgttgacacagtggacaatatagaactttgtttaccaacggtctcttcagctaacgatagatttaaggttgaagtttcatcatcaaacttaagaaatgccaaatagttattcgaattcttttttgaaaggttagtcttattaagaatattattgttggagtcacctttaacgtgcggtattataggaacactacgagttcttctcttattggtatttgaaaagaccgaactagtggcagaagaagaggatgtggaagatatgacagacgaggtagaagtaggagaacttggagaatttttatcatgacctttacccactacattgtttgagttggtatttgtttcgccgttaccacaattattgtttccactgaaaaaggtctttctgccaggccttggtcttggtggaagaacccattttcttgatgtcttaatagtagagattacatttccagtacttggaccagccgcgctatttgatctattgtatcttttatttggtgaatttaaagaatgaccactgtcaccagttgaaacgacactattaatagaaagcttcctttttggaataattggagtaaagtggagggattttcttcttcctgaatttggaggtggagcaattggagtattattctttaacaaattggaacttaaagcaacagatggagacattaggaattaatacttgaaaaaaatatacagatatgtaataaataaacaaaagggattaaagccagttaataccttttttgtattttaactctgaataaataatctgaaacggataagtatagaaataataaaatattataaaaagatactgataaaaaaccgatgtttttattatggaatattaatttttggaataagttacaaaaaaattttgaatgttattaatatgctactattattatcaatatagaatgaacttatttaagtgatataaaataaatatttaaaaaatggttgcaatgatggatttaaaaaaaacacagtaatcttacagtctgtctatttttcacacgttattttttcagaacagacacgtataactatgtatttaaaatatgaatttattttgtacaaaaaggtaatgtaatgtaatgcactgaattttcagttcttatctggctcactcgaactataaaataagtagtataacaatagtggacaatctagtatttctagtcagataattgtatttacaatactggataacggaagagtctgctgggaggaaaaaaaccattggatgggcccgctaaaaacgcggcaaggcaagagtaagcgaagtgaaagtatcagagatggctacccgtcttcttatttatatatacttaagctttgtttgtcttttaagaggatcataaactggggggactggagaaaataattcacatgtattgttccatatttttagaaaagcaaaattccttcgaggcaacacgctttgttaattcttcgagacaagtcttgttttctgctgtttccctttcctcgagaaagagaaggacttttttgaaaaacaattgcaacaaggacaatacggggttgtatttgtatgtttctattattttctataatagttttatgcaggtttatttttttagaaaacaaaaaatttattaatcctattatcatagaacaattacattctaaatacaatataatttctatcattttttaacaaaaacaaaaaaaaaaacgtttttttctggtttttttttttgatgacaaactcccaagagatttagacaaataaaaaaagaaaaaagagaaaaaaaagtgaacaaggagataacggaagatatgataaacaaatatatgaaactgaggtaatacttcaaaaatttctgtcgcttaaagtttcttggttccattaacccggaagtgaaaagaaaaggagaagactcgagtattgtttattgaaatcatattgtacaataacttttgttcattttggaaaagttacttcagtaaaataaacaaaagaacattggggctacattgtttgcaaaggcattggtatataatagaatatttaaaagtaagtcatctatctatacaatacacaacactgcttaataatagatcttacttaccctttatatctgttatttttgattttctgaagcttattttgtattatttgtcaatgtttcaaaacagacagagctttcccgtgttttacgccgaaggatattttaacattaacagtactatatttgttttacctcttgctacttgtatttctctttagaaaaagaaaagttgataagtaactactgataagtggataataaaaattgtctcattttacgttaaaagccctatgcatcaagctaaagctttttgtggtagcttcatccactgaaattgctttataagctatagaggactgttagtgataatagaaacacaacaagcattcatgtataagtacttaagaagggagaagaagtccatattgatcgtgtattgtattgagttatttgttgtgggtataatatagttgacttgggctaatttgccttcatgagttcctaattttattatagcttctttataccctcaaatattttgattacaactagttggcattatttagtttaaaacggagaaaaaaaagaacaataacgatgatgatgaaataattactcgttttaattagattgtcttgactgcaagtgttttattatcacttcttaaagagaatgatcagattgaattcagtagttgtttagttaattataattgcaatatagatataagtagacatatacggaatactatggatcataagcgattgtctttataatttcgtttgtaagaggtattgttaataaaggactacagttttcttttgttattacaagaaatcacgattattccaactacatccctgaagtactaagttaatttttgttgttacatgtttttataaaaagtggtaacactgttagttagtacaagagttgcatcttttattcaagaacaagaaaatatttattctattttggtataggtagtgagacaaatgtgcgaaacctaaaaacaataaaattttaatttgaagaaattatttgtatataatattatattgtgtgctataaaatcttactaagcatagatagttggctagaattcacagaagattagcgcagatatcattgtcatttttggtaaggggtaacaaaaattaccattttaggattttttaagaccaagacaaaaagaagtaaaacaaaagacatatcatcattattatttcgtaaattcatgatataatatcttttataattagatttctatgacataatttttgtgtgagtttttttttcttcttattatgaaataaacaattgataaaaaaatgtaaacaatcaaataaacacaaagaaagacaaaaaaaataaaaaaaaataaaaaaaagggaaaagacttttggaaaaggtaaaaatttgactataaacagcacaatttataaatttatcccggaatcagagtggaatatttttgacaaaaaattttttctagtgaacgaaccaaccacaccaattcacgtaacggagcatgggagtttgtgtcttgtgggaaatttgttaaacttacccttggttgtattttataaatttcattttttttaaaataaaaaaatcaataacctaagattgtgcctagttttacagctgagaagttatcgtttctcattatattcgacagacatatataacttttattattggtatttttttaagaaaataagatgatgacaagattaaaggatccatccatgtctttcgaactctatcatatacattatacttttcgagttaatttacctttcttatttactaacgtttttttgttactcatacaaatggtcatgttcttgtaatcatattacagttttaatgaaaaactaatgtcttttgaggttcactgtattatttaaaaagttcttccaatatctgcggtggtgtcttttatttacatattgtcttctttccacataatattttttactcataaacaaaacacaaaattgaagaaagtctaaccctaatgttttcaaggtttattatgagaagtaaattcagagaaatagttaaacctaattttcttttaaggaatttaaaataataatatgcttgctttgctttatatcaatgtggctggaaaaatttgtgtcaaaaaattatcactttacttagagttaaaatgagatattttttgtcgaaatggtgcaatttctgtttacatttagaaaagattttgacctattgtttaagttttttttttagaataaaaaaattgcaacaactttggttgttggtctctttttctagtaaacgagggtttagacataattctgcaactcagcaaagatactatctttctgcttgaaaccatatcaagatgaataaattatatgttcctgtttctaatacaaatttagtaggcaattaaaagatatgggctattatttttttcaagaatggcaatatttaacatatatcttagtgtgtaatatatcgtttatttgagtgtacctgatttagttctaatgggcagtatgaccaagacatttttttgtgtgtcaagagtttgtgctaggtcaacatttttgaattgtcaatcagtttttactaaggttgtggaacattagggtaggttttaaagttatttcgtcataattttttttcgtactatatctgttttcagtttctatctttggacattcacatagtttcgaaataagtgtatctcactctacacgaaactgagattttggaataccgtttgattagaggtacccacattccctactattcattaatattcttttttattttaaaagtaataatttatgcttaatagtaaacttcacataattatcttgatcatgtgtggtgtttatttttttcacaaattcagccagcactcctttgtctaaaaaaatcttttccttcttttttttgctctatatttcaataataagctctattatctttttgttctgggatctaactgttttattcctatttagtctgatctgttaagttatccaagaaatggcattatatatatgtattttaatttacagtttactcggtaaagaataatgaaattaaacaaagataattggtgagctatctctaaggatgtgaataaacagactccttttgtttattagatgtgtgagcggataaatgccataattgtctgttactattagcttcgttctaattatttaatggcaagtatgggagaaggagggaaattaatgaacaaagaatatgacatatataaccttaagggaaaatatctttttttttgtcaattgaagatgagcttgacgtgctatatcagaacgggcatgtatatgtatagattaatagatgaaatattatcgtgtaaaaatgaagatcttgtagtgtgatttattaagataggaagaaaagaaattgcatcatatctggtatgatagctgcaaggttagaccttatattggtatgtagttaatcattgacagatataatttcattcataattagttaatctataaatctttttcaagaatacagacttattacctgatgtgttgtgacaaaatgtacgtattgctatggtattattaaattttttgcaaatttttagtttcgtaaagttgctagaaaaaaatgaaaaatttaaaaaaaaaaaaaaagaaaaaagagaaagtaacaatgcaaataagaaaaaccatgaaatcacttaatagtaatgtatgatttatgaatagtaatgttgctccaataatctatcttttttttgttattttgaactttagtaatttatagataaaaaagtatctaaaaagtgaatacaaggttaaattagagtattttttttcgttttttctcattctttttttttcttattttgttattttaattccacatgccattaattttgttaactgggtacccgtcatctggtaagactacttacgtaaatcaattggttcaactattgaataaaaaaattgagtctgaaccatctttatcgaattataaagtgattgtccactcagataaatcattaggtattgagcacaatgattatattacatcacaagatgaaagaaaattaagatcaaaaattacatcagctgtcagaagggatctaaccaaatcaaatattattattgttgattctttaaactatatcaagggttttagatatcaattacactgtgaggtaaaaaatctagctacatcgtttctatgtatttatgttatgtcatctttaaaacaagttcaagaatggaatcaggtgggagacttgtcaaaggatcatactccatgggatgataaattattaactgatttggtagcaaggtatgaggaaccgaacgaaacaaataggtgggattctccattattcccacttttgtctccgcacgatacggttgactctattatcgacccaatttacaatattatcttttctaattcaaataaaaattctaagcaatcttcaccatcactagagagcaaattgaaccaattgaattcttcttctaatattaataatggtagtttacctggtgttctaaagcctaattcagtgacattgttgaaacctgcaaagcagtccaattttattcaattactggagattgaaacatcaaaagttaataaggtaatattggcacatttaaaggaacaagactcaattggaaatggtttgagtgcaggacaatcaagcagaattataattgaaggtgatgatgttgatgatcccaattgtatttttgttgacattaattcgagaaatattaacatagccaaattacagagattgaagcgacaatttattcaattaaataaattgagagatttggacttggatagaatgaaggcactttattcagaatatttaactaaaaacttaacagattgattgtgtaatatttttttatacacgtatacgtatatatatataatgttattgtattgcctctcttcaatgataaatctatgtattttatctgtatgcgtttttaataataaaattcttctcatcgaggaaaaatttattcggtgaaaagaaaaaaagaaaaaacagaaagaaagaaggaaaatctggaagatgatagtatataatatgcagaaaaaccaatgcgtttgcattcaatgactgtttaagatggcgtataagaattgatacgcaatataataaagtaaaacaatatctatatttgtattatatagaaagaaaagaaaaaagaggaagaaaaagatgccatttgtaaaatcagtgactacgaaatataaatttggtgcacatgtttcaacagtaggtgggatatcaaacagtgtaattaatgcacataagataggttgtcaatcttttgctatgttcttaaaatctccaaggaagtgggattcaccaccattgactaccgaggaaattgagaagttcaaattaaattgtgaaaagtataaatatgatccattgaaggatattttgccacatggacattattttatcaacttatgcaatccagatgaaagtaaagcaataaaagcatattctcagttgattgatgaattgaaaagatgtgaacagttaggaattggacattataatttacatccaggtagtgcattgaagggtggcgatgtgaaagttcaattaaaacagttagccaagtatttgaatagggcgataggagagaccgagtctgtggttattgtattggagaatatggcaggtaaggataatttaattggtaatagattagaagacttacgtgaagttattgatttaattgacaataagacaagagttggtgtgtgtatagatacatgtcatacgtttgcatctggatatgatattcagtcgtcaattgaaaatttcaacaaattttgggaacaatttaatgaaattattgggttcaattatttaaagtccatgcatattaatgactctaaagcaccgttgggatccaatcaagatctacatgagaaactaggacatgggtttattggattagaaccatttagatggttagcacatgatatgagactcgaaggcattccattgattcttgaaacaccacatgaagttgacgacggctatggtgaagaaattgaactgttgcaatggctggagacaattgatgattcagataataaagaattgataacacgttccaatgatttacaaaaattgggtgcaaagacgagaaaggaacagcaagcgaagtttgagaagaaacaatcacagaacaagaaaagaaagataggaggagatgttataagccaattgacaaagaagaaaagagtgaaaaaggagtaaagtatgcattactaaacaacgacgatgttgtgtatatattattattattatttcatttatgcatccactcttattcattatcgtaatgtttgtgtatgtacatatatagtactattatcatgatgattaatacacacgtcaatatattgatctaatttagttgagtcttgatctggtctggcccaggtaaaaaagaattttaacaagagagttctccccttcaacccttgtaatctcgccagttttcttccccttttctttcttttcttgtgtctctgagatcacggcagatcagatcaaactgaaaacaatgaaaaaaataaaataaagattttaggaggatggaagggaaggccgtggaaaaagaaaaaaagaaaaagaaaaaaggaattcttgttttgttttgttttgttttgtttacattttgtatatgtgatgatgataaaaagaagcaatgagctacaagatgtgcaacaaactatatatggtgtgacctgtgcaactataggtatttaaaatatacaaagaatactactgtgtttgttgatacagttttttttgttttttgtctactttggatttggatcggttccattctgttctgggttttctttcctttcttgataatacattatttggaaaatactatattactatatatatatatacattacacacaaacaattaattaataacgtatggtgaatatgaattttcaacaagcttatgcagagtatctcaaaggtaacaaagaaaaaccaaagacaccccaattacaacaactgaataccgatttggatattcatggaaatataaataataagaaaaataatcctgctattagtaatagtactaattataacactaatacaaatgcgtttggcaatggtaatattattgtttccccacaaaatttgcccactccacaattcgataatattcggatttttcctactccaataagttatttaccttcatctccaatgcaaggtttaggtatttcaagtgttacttctcctattttacaacatacaaattcagtttttgaacaacaacaacaacaacaaagaaatcaagtttcagcttctatatcttctactgattcgattctatctgagattaatattaagaaaagacgcgacaaatttactgttttaaaaaatattgcattaaatgaaattaatcatattaacatacaacataaagagccaaggaatttggatgagttattgaagactgaacatcgtattgtatcagagttggtgcctgctccagatctatcaccaaaacgtatatcttctttacctacggttagtgaagaattgtctttttctactctgaatacatcaactgatattaataatgttacaactagtgactatgataataataatcatgataataattacaaaaatctcaagataggttctaatatagatattttgaatattttcttgttacctaattttgatcactcaataaaatttaatagaattaaacagattggtaaaggtaattttagtgtagtggatttatatgagaatattgaaagcaatccaaatgaaagaaaccacaagttggtggcaattaaaaaaattatttatccagacaatttgtttatgcagatcaataattatgatagtagtggtggtggtgatagttatgataatgacacagaactattctcaagttttgagagttccttaatcagagaattatctgttttgcaaaaattggaccatccgtgtataattaaactttatggtatcaataatccgatttttttgaaagataagactcctttaactacactattaagacaaaataaaaaggtgattagcagtagtggcaatagtacaagactggacataagtatacctgaatgtgacattgtgatgtcatattgtttgggtggtgaccttctgaatgcgttagctgaatgtaatggtgggttggaagtaaaattaattcaaagaatatttacagaattgagtttagcggtcaaatatcttcatgacaatttgattatacacagagaccttaaattagaaaatattttattagtttatccgttggatgagaccaaattaatggcaaacgatgaatcaagacaagaattttatttgaataacaatattattcaattgacagatttcggtcttagtaaacaactttctaaaaatgatgagctatgcacaacaagatgtggatcagaagattatgtatcaccagagattttaatggggttgccctatgatggtagattgagtgattcttgggcgatgggtgtaatcttatatgcattattagaagaccgtttaccatttgatcctccagtaaatgctactctcagacaaagaagaagagctacatcgcatagaatagcaggttttgaatggagatggaataaacttaaagatatcaatatgcctgcaaaggaaattgtatcaaatacactgacaagaaagaacaagaggtgggatattaataatattatagagtttaaatttgtgtcagatttagtggggcaattagcatttatatgaaaagagaaaagaggggtaagaaagaaagaaatgaaatgataaatattcccttcataaatatgtacctctctctctctctctttctctccatatatatacgtgtgtatgtgttatgtcatttatatgggttagtatcaatattcaatatattaaaaaataatagaaacaagagggaataagaaacagtttatgaattttaaagcttttaataattttgtgaaggttacattaacattttttcgaagacaaaagaatacatattttttttctaattagcaataaaggcaaatgtatatatatataaagtatatttttatacttgtgtgtgtatgtgtgtgtgatattttagacagttgtataaatacaagttaataactattcaaaatatttcttttatttcagcttacttcttcttatttttcttcttcttcatcttcttcttcaacgttgtccttatcgtcaatactattgttatgatcttcattctgcatttgtttcatcaattcttccagttgtttgctcttatctccagataacatatcacccaatccagctccaccggctccacctgcaccgcccatactcttcatcatttcggtgaaatctaaaccaccagctccaccagcacctaatgcgtccatcccagggatatcattagcttcagagacttcatcttgttcatcttcatcgacccacttgtcaaagtccgttttgatgttgttatatttgattttttcctttgtcaatcttggccaatattccaattgcaaatcctttttgaacatcttcaagaaataatgttgtccattggccttcttgtgtagagtcttttcaggaacgatctctttatagaagtcgatgtgtagtttgtattcgtgttcagtctcatcgcctacatggccctttgattttgcagtgaggtcaagggaggttggttggatgtctagaattgggtcttcacagtcggtgattgaaatggttagtaggatgtagttcttttctggatcagtttcgtttgatctttgagcccactgaacttctggtaatagatatttggtagtcatttctatgagtgtctctgtaattgcttatgtatatgtatgtgtatctgtgtatgtatatataagattaatatactttcttccttctttgaaaaacagaaaagggttttacaatcttatctgagcttgcactaactaagttgggaaggttttctatcttgagattgtatattttcagaacgagaagtatttaaagcattagtgtgcaaacaggcaagtacacatatacatatatatatacgcgtttgtatgtatgtgaatagatagatggatggagagatagaaagatctattcaaaacttgcaagttgcatttaccctttctgacaagattgtttcctgttcttctctccccccccccctctttctcctctttccgaaggtcaaagaacattgtggaataaaaaagaaacacacatctccacctttttttttccttttgccctctgctaccgtggcgttaccctccccactttcattccacggccgctaccagcgaaaagaaaaatgcaacaaacgaaaaaaaaaaaattcagagaattgtacaaatttgtacttgaataaaaaataatggaggtgtatgggttcatagggtttcctcatcaagcccaattgtgtttgttgtgtttgtctttctttttttccccccatcctcctcctcctgtttctcgaacatttggttgcaccctagtagatgttgctgtgtttagggttttgcttattgattttggaaaaatgagggttgatgatatttttctactttttctgtaatagatgagaatcctattacaagagacacactcttctagaacgctaaaatagataaatatagctttatttgatcgtctatatatgatagataagctttattctatacaaggagcaactaacatacacagatataccgatatttgtacttatataaacaagaaaaactagaacattgtcgttggctaaagagttcacaatatcgttcatagtgatatccagatttcatatgtcacaaaaagtaaaatggacgagtccggaatcgaaccgaagacctctcccatgctaagggagcgcgctaccaactacgccacacgcccagaacagtcacgcccctcgttatagaataggataatattaccatcaagattatataagatcctgaatgaatctagaattatttattgttttaataagccatacacgtgctacaactttagatgctgtataataaaaaggttatttccactaaaattatacaaaattctgagtaaatctagaattatctattgttttagtaagtcacacatgtattactaatgactataataattgtgccgtttatcagtggtgcatccaattaccataactagtaaattggggtgcagttactaattcactagtgcacctaaattagtataataaatattagggtttggatcactaagctcattaatgtattaatctgaatagttgatcgagttccagaaaacatataaaaggacaacgttttctgaagatgaaaactattttccgtcactcctctcttatacataatttatatagagtatatctcaaaaagtagtggtatttgtatttagcatagtcacaacttgacttattagtaaattagacctctggtttattaaaaacctataaaaataatgtatataagtatatgatatatctatatataaatataaattgatctctcttcttttgattcttttcttaaaatttttcttcttgaaaaatacttttctcttttgattatcattattgacagtctttaataaagaaacctaatagaacacactgtctatgttctaacagaaatatcaaaactttggaaaaactcttgacgatattatttaagaagttgaaaatgaaatgaaaactttaaaaaaaaaatacataaaagacaaacgtaatgatataacaaatgataactatgatacaaatacttttaaatctaataatcatgcccaaaaagatgatttagaattggatgaagtcaagagtaaaaagaaactatcaaatatattattcttcaaaagtgatgaaaatagaaaattttatgaatttcaaaataaagaatgaaaagcataagttgtatttttaagccaatagtaaacaaagcactactatatcaaatattaaaaataaaatacaagaaaaaattctaacttcaaataataacaaaaggataaaacttattgaaaataaagttcgaatacctactaacgaaatattagtagcggctggcacggcttctctcactagtttaatttcagataaaaatctttcagtggatttcagaactatcaaagatacccctaattattgaggcataggagataaaacaattaatattaccgaatgtggatattcaccaatcattgaaggtggaaattcgataaaatatttgtatgtgtcttataccctaaaaaagacagaaactttgccaaatttaaaaattctatcaattttataccagtcaaaatcattgatgacactacctttgttaaaataaatggcattatagttgatttgagaaaaaatttacaagatacaaacaaatctaataagacaataaaaatcaagaaaattttaaaaaaacagagtcaagaaaaatattctccttattgaagcacatttaagactaaaccatataccatcttaagtaattaggaagagtattaaaaatataatatttgacgatgtggatgcaatagaaaaaaatgtaagtaagaataattcacggtgtgaagcatgccgtgcagaaaagatgactcgacacttccattacaccgactccatgaattgctggaatgatatattaccggtttgagtaacatgtaaatatatcaaagaggaaaaatgtttgttttgcacattcaacattatggagaaaaaattaaacagaatcaaaataaattaatatattatgaaaaattgtcaaaaggtaaatattatatgagtagacgactttacttattaattttccaatctggatgaataagttatatacattttatcatatgtttcttttatatttatataattattaattcccaatcaaaagatcgagggaaaattactctacatattaacaaaataataatacacaataataacatataatatgatcaccgacgctaagaacatgtatactaatattattcgtccagaggatgactcactatattgaacaaaagaaatctggatcatcatggagtttagatatatttggtccggtcatcgtgtagctgcaattacagataaatatatgttattaatggtagacaatattagcaggtatcttcttatctatttgagaaagaaaacaattatagcacagaagaagaggagaatataaatattagcaaattagaggatttacttgctcgagtctagtctgaagagaatttagtcttgattgagttctaggatttacaaaggcaatgttaccttactggatacttgtagccttaactggtgaacatattagatatttttgttaatatatatttctcgttggtttcatttgtttatacatgctatatagatatgtacgtatgtattgtataaaagtaaatagattatcttcttatatcccgttcttttctctctcttttgaaaattttcccctttcttttctatattcaggcaccacatataacattgttgttataagaaagtctttaattaataaaaacttttttaatatacaatgttcattgtaataaatccagaaattatatatgatcttattgagatttagaattatatattatttttataatgccatatacgttactattgtgtcacgtaagtttgtcactattacttatttttcaacaggttctatgaaatttcatcgtattattataattaattattggagtgtgaattaataattcattagtacattaaattagacagttgatctagttttagaaacacataaaaggataacattttcatatgcattaatatttttaataaggtaatcccttgcaaactgtaaaagatcatctcaagtactttattaaaatgtaaatttttttataatatctaaacacttgcacactataaagttttcgatttaaatctatcaagcaactacatttttttgatactgttattttttattattatacaattttttgtcattgatttcctgaatttctttaaccaagaactgttatatataaatatcaacaagagataaacatattgttttatattaggattaatttaatttcttttttaatgcaaattttttgttaatatattttaaagatatatcaaagtgtgattttgtttaagataatgtaaggggcctgtgtgtaaggagtcctaactggaaatcccgaaatatgtagtttgcgagtaacgcctaatgtcgaggcgaaggacttggaacaaccgaaactttggacccaaggttgtgagtgtgttcgaacgagcatatgatcgttggatggacattggtggtaaatcattaagaagcttacttaagagacccttgattattgagagatagtgccagaggtaattatcagcattaatattcataatctatctaataggttaagaagaataagacgaatattcaagactaatctatttaatagttagaatcaaccaattatataatttgtaagtgtttatatatataattaatatccatattttagtatgccacttgagataacccttacactgtgttcttttattccttgaaaattgttggtttttttgttggttaagtttgagtattaatcaataaataatgggaaaaggctttcaaataaacaaaatataaattataagaaaatataatgaaaacaaaaaactttcattccaaaatttttgtaattacctttataaaaagagtaataaatagtgaacactacatttgaagtttctttaataaaatattattggaaatattagacaatacttgggaatgaaccaatagaaattatcaacaacaatgctgttgaagtcaataaaagaagtaagtctctgaaaaatgtatgaggataaaatattttgttccaaagtggaaactatatattaggacaaagtaatgaatacaaagaactaattttaaaatttttttctgaacattttatataattgtactttatatttacatctatttatatatatacttgaatattacaagaaattaaaaaaatttatttataataaatatactaataacttcaataattaatcataactacgaatttcagtaacatcttaaacgaatttttatatgaatattatatcttttctttttactcctattttcttgttacttttatatatttattttccttgatgtaaaaaacttcattaatgaaaagtcattttattgtcaataaacagttccagaataataaaaaagacagaaacaatttgattcattgaattagttgaatcaacattagatatattcgttatatttatttagaaaatatattgatgtggttaaactgaaaaagtactttatttaatttattcaagttaacaataaaaaaaatcaaaattttattattggattatacacaatctacgtgtagctatctatttaaataattatttgtaaggaacctaactggaaatctaataaatacgcaattccgagggtaacacctgagtgtctgagtggaggattggtacggccatgtgctcagtggctcgtagaaggtattgaatctgattggaggatttccagcgagtgagaattatattggatcttgtcaagaagcctttgattattgagagatatgccaggggtaatcatcttatttaaatacatcttagtaatgatattaagagttacctcttaatatcacacaagaacaataagaagaagtaatacaacatcagggttgttaattagttatatatagagcttacgtaagagtgtttatgcttatactaattgatacgattcatccatttacacacaacaacttttacattgttatgttttaatattctctatttcaacttttgaacataataaatatctgtttttttacctgtttgcttttgttttatacctactttgctctcttcctgaatttaaagcaactttacaatctcctattatcaaactcaatttaattataaaataatacaccactgttgagaattagtatatacatatattgagtatactctctgacgcgctgaaacactagaagagtttaattattcactagttaatttgtacacataactaaaccattgttttagtatcctctcttatagatttatcaatttttttcaaggttctttattaaatcttatagataataaaccacaaatgggatcatatttactaatttttaaagcttttaattgacttcgttctattacagaatatttggacatatcttcctttttttcattagaaggtttcaccataacttaacagagattttgtaataacttctatcagtaataaatatttaagctaattgtttcaaaatttttgatagattctgataaaactttaattcttattttattaaatcttcttgataacataataaacacacttgtctgattatgatttcacagttatcaatttaacaaattcaggtttcgctcctcatgacaaccaccatttcgccctgttaataattaaaatcatcactcctatttttatgataattccaataagggtaaaagatgttttgacttagacaggatgattctgtaacataataaaaggaacatgtatacaaataatcagtagtgcgaataatatggttctattttaaaacctaaatgaattttttttcgaaacatatatatatagcatagaggtttcactaatcaaaacaaacaaacaaacaaacaaacaaataaaattaatatggaatgtgaagaaaaaaatcatacatatatatacttgcagattccaatgtgacttaaagacagatcttttaaagttaagtagagagataattgcagaggataaaaagataataacctattccactagttccttagttatgttcaaactcaaattgaatcctagtttaatcaatttcttaaaagaacttagaaatcaaaaaatcatatcgaatgaagagttaattgacttaattgacgtacaaggatctatatctctccacacttttttagaattatatggaaaatatcaagaggatcgaagttctaaagataaaccaagttatgatatcaaacatctattaacgccattggagttccaattcaaacccaagaacgcgcccggttcaaactattctccagaattcaaacagcatttagataatctacgatataagttaaaggaaaaagaataccaagaaatgattaaatctaattcaactgaaactttaggccttggaaatagtatagatgatttcaacactcctgatctgacaccatcacaaataaacaaacagattaaagaacaagtaacaactgtgtttaatattcttcttagtgtggtatctgtgatagtggcaatttggtattggtctggatcctcaagtagatttccagttgaaattagaatacttctatgtttattttttggattgctagtattacttgcagaggtagtggtatataacggttatttacagagacttaatgaagcaaagacaaaagaaaaatcaaagaaggaaagaaagaaagtcattaaaacaattaaaattgatgcaaatagaaaaatacaataatgattaaacaaatacatgaaatgcttcatatattttaatacttataaattaaacgtctattctggtaaatacctgaaattttccaataatccaaactaaaagaatagttgaattcacagaatatctataatatttattatcactatttccccccttctacttatattacataaaaaaaatgcataatatgaatctcttcatatctccacctaaatttatatatgtatatttgcatgctcacatatatatgtagagaatatcccaaagtctatctatggatgcatgttaaaataatgttatcaaatcacaaactattaatgagaaagaaaaaataacaatcaaaagtgtaatcaactaatcatgtcccaagactttcttttcaatagagtaaactaaatgcatagtctgttccataagtgttaagcataagattgtatgtggtgcaattctaaatacttgagcttggaaccccttatacaaagccattgggccttcaattttaacagtcttcattaaacaatcgataggacctttgtatttgttagtcttttgattatatattcttgttagaatgacatcccaaggattcatcacgactgcaacacctagcccagagatagtactagctaacaaatgtagatgtggtccattttccatgatatcatgtctcaataagaaatttttggctgtattgtaaattggtaattgaactgaggaacctgcaccagttcttaaaatggcggcatctacacctttaaaaagacctccaataccaccctgtttgtaaattgttgataacccattccaaacaccggtatagtgggtttgatcacccaattgaacagctgtggaataagattgcattcttgtcttaactaaaaataatggagatccaatgactgcaccaataatacctgagaaagcacctgagaacacattaacacccacattttgaatatggtgactctcttgattcggatacaaatatttatttaatgttagtctaattggttcgtaaaaccctaatctagagccatttaatgcaatttgataaatataggcagagatcaaacctttttggcaacctctgataccttcatttttaaaagtaacaacaataccttggaagggatttctatagatattttcacctactgctgacatttcaccttgcagttgcattctaattttaacaacttcgacagggtttgtgacagtaacagcaaaacatgctgctaaaccacctgctatgaaggaaccaaactttgaaattttttgagctgcagtcttttcaacaggtttctctactttttctgacatggtactatccaattgattatatgtatgtatatatctatatccgtattattagtaaatattcttatcgttattcgatgtttatatattctcttccagggaaggattaaaacagacaatagtttgtatggttctattacggcccagtaaaaatgttaagaaacaagaagcagaaaaaaaacggtgtaactccaaatacaagcacttaaaacaatataaaacgacaaaatcatagatcctttatatacatgttcgacctcccagaaatcgcatagctcaaaaaatatttatatttatatacacataattattaggtacgtgtgtgtattatacatatactcatatattcctatcaatctctccgtagtcaagatgaccgagctcagaataatagtaaaaccatcgctcgaaagatctgaaaagttttaaaccaaaaggagaagaaaggggagggagggaagaaatgcaagaaaacaaaagataccacacagtttttctctttgttcactgtggtgactcaatgacgatttctgccggagatcaaattccgtgctgacagaaaacagcgggaagagggaaaaacgccggtaccgctccgatatcggcctcaagaaccttcaagagtattttgacaagcaaactaaattattcaatcaaaccaaaatagtttgaacatttactacgtaaaaatcctcacatgtgcattgcgcagtggggaaaaagaaaacgaaacaaaagttaacatacccaaatgctaattcattgtatagaaactctagattgaatacattaatatcaatatctatccatgactttaaaacttcttgttataataaaatcataaacctatttagagaataaataccaaataatattagctaatatatttacatatctgtattcagctgatggcaagattcagtatatgtgtccaagctcaattaattttattcgaaaagaaaaaaaaaacatatcttcaaccactttttctaagataagattaaactatatccaacgaaattatactgatttgagtagtatttttgtgaaaaaataatacgttttactatttcttttctactacacaattttgcctttcataaagagcttaaagaaaggcatttttcattagcacattatcattgtacaattgaaatcacaaatgattcagttataacattccttttagaatcattagctttataacggtttgttcacagcatgttcgctacatgcaccagcttatcttctacacttctcactttaactaggttccgactgaaacatattattattccaaagcttctcatgttttgtctattatctccctcgtagctattccctttttttttttgtgaaactccagtactaagaaattaaatcttgttaatagtaaatttgaacttttttcattctttatcttccgtttttcatataccttttttttttgggttgaatttcatcaattgaaaatgcagaaagttacttaaatccataaatatacagtatacagtagtaaatatcgaatatttatgttattttgatattttatttgtttccaaatttgtgccaattaagcagtcgtcagtattcagtgcataataaataaagtttcatagggtccatcccgcggcacaattatatatctatatattaaaagaagacaaaaaaaaactatcttcatctgaaattattcagtattgtgttacagtctatacaacgataattcatctccctttggcctaaagaattcttccgtattggttcaaatcgagtaccattgcatgtagaacaacgtaaattcaatgctgagatactattaatcgtattatttcttgaactagatgcactataagtattccccatgatggaatgaccacctttcccctcttctacaattttaggaaacatcccaatattacttgtatcattcataagtggagatttatcgtttcttacagtggaacgacttgaatctatcatacttcttgaatcagaaccggtacttaattttgtgaaaagattagaaacattgctctttctgggacataacccaccactatttttaccccctttattaccatttgtatttttatcaccagaaatattctcaacatgtgatgcatttttcattttgctactgtcatctccatcaccatcatgtacattatctttttcagcaccatcactattatgactagtctcattaccgttatccaaagaaatattattcgattcctttgactccaaatctgttgatcctgtcaatgttctattagaagaaaatacagaatgatctaacatatcaaaactattacttttagtagtatttggagtaatagtaatattgttattagtatcaatactatcattgttattgaaattatgcctcataatataatcttgtttctttaattgatctaagataccatctctaacatcctgacgcatatcaaatctaaatattctgactataccatgcgaatcactagtcacaataataggaccaattatactagttgaatctggtaaattgtattctattgctgagttcaataatttatcacctaataaattctttgacttatcatccattccatctaattcgttattattccttaattcccttaaatattgtaacgttatttcacaaatgaaatcattcgataatgatagaattttggatgttgtctctggcgctatgactgtagtagttactgcatgatgatgcgcatgaaacgataaatactttgaattttttttagcagatctatcattacctgttatgttattgggaaacactttcgaaaattttaatggcaataatttagaactactattaaagagatttaaaacttcatttttctttttctttgtcctctcttggtctgccatttggttcatgccgttatcattaagattattcttagtcttaatatcattttgtttatcagaatgcagtgtccaaccataaacccaatgatcatcactactgcaaaccacaatgcctttattatggtatttgacatattgagctaagtgttgggatgatccactactaaagcctttcaaatattctaacaatttcctcgttttgatatcgaatacccgtatccttgagtcatttgaagtgacaataatttgtctatctctagagactcttgcttcatcctcaataaattcaataccagtgatcctgggtcccttaaacactttcccattgagatccatgctttcataacttctagaatgaatcccctgagtcgacttatccgtgatatgaaacgatgtaactggtgttaaagtgcttgtctctaagacatgaatgaatccattgaaggtacctacgatagttacctctccatcacttgcgattgttaaagaagtgatcaagtcatgacaattataattgaaacacacactgttatcaataatggaccataatctaacgttatgatctaaacaaccagaaataaagaatctatcatcctttggatggaaccttacacttgtcacgaaatcgacatgggggaaaattttcaacgattgtgatttttccacgtgccataacctgacagttttatccattgaagaagttaaaagaaaatcatttttggaccaatccatatccagaatatcttgaaggtgtccctttataaatatggttattggaattggattaaaaaccggagcatagagacttaagacctcatcaccatctgttgtatttggacaagaattttcaaatgagaccctgctattactgttgctattagtattgctgctagttgaatgagtggtaccatggaccaattgattgattcttttattttttagcagaaaatcttgatcttcgttagcgatgttatttaattcccacctctctgctggagaagatataactttccacactctaatagacccatctttgtatcctacggccatatatttcccactgacactaaactttaatgacattatatatagagagctattgacactgcccttgacattgctacttgtacaattatttgatgaagaatttttgttgctattactgttattattataagtatacttgttagaatgaatattatttgaatcagaagatgacacggagagcctaccaccaccaccacccaatatttttttagaatttgatctgtctgaattattattagtggaaaaaaaaggtgtagttgttgaagtaggagtatggatattgctgttatttatgcataattcttgggccagaaacagtttgttaaagacacctatatttttatttttatttttcatgttgcgataaattttgatatattttggtttctccagaaaacttttaaactgatcgttatcgaatatagaataatcttttagttggagagtggatgggttaacaataatattattctttacatagttaaatgaatgcagactatcatcttgaatatctatcagatctttttgatcacggctatgttgattggtgtaagtacgagcgggaagatgcctattcattttaaatgacaaaggtttaagatcagcagaatactccatttcattgaaagttcttatagatgcctgagcttttagtgaggggttagtattatcattattatcattattattattattattttcgaaagaggtagagttaggagtagtattagaattagatgatacagtagaagaattagtagacactaacgatggagtagagtatatagtaggctctatagtatgtgaattagtaggcagattgagatctgcatctgtcgtactattattactattgttaatcgaatccattgattagaatataaagaaatatcgtaatactgacaataactaaatatggatttaaaaaaaaaaaagaaaaaaaaagaaaaaaaaaaagaagatataaatctttctctttcctattttattagatagtaataatagtataataccaatataacccttactaatatttgtaatataatataatgtaatataatataatgtaatataagataatattaggttgaaataccctatattgtctaaaaaatattgtcaattttataaacctcttttgtaatgcaactctccttaatagtgtatgttgtgtaattaactatataaatataccgcatatatatatatatgtatatatatattatataaatatatgtatgtacgaatataaaagaaaatataagatagatgctagcagttattaaagccacccattacaatcgatcgcacacgccctacaactactaaaataaacgggaacaggacgcaagaatatcgaagcatctgtagtaaataaatgctgcgacgccttcatctttatttaatcattcatctactctttctgtggtccgcggatttacagcccattccactccgctgttattgttatttgccatcgctgccacaattgtgtgaaataacaaaagagcgaaggggcgaaggcaaaattgaaaaaaaaaaaacaaatttttggggacgagaaattgtaagccaaaaaaatggaggcgtgttgcaatattaatataaaaacagttcgggcagaaaataatattctgtgttttttccaagaatcgccgttgagtagagtgagggtttgtggaaaaaaaaccatctcggaatcaaccacctacatggatttggtatatatagttcaggctgtattcattttcctgtaaactttatgaggggtctgagatgttcattttttagaatttctcactttattattactcagtgacttaatatctctttctacattatcacaataattgggagtaaacaatacattttttccacctttttatttttatcgaaaggatacttgatagtctgtcttatgattgtttaactcaatagtattaatgcaaccatttataaattccactgttttttgtttgcttatctctcttttttttggtcaaactaagtagcgctagggtttagtctgaaaaacagcaagtcagacatgcgttacaatattgtagggttttgataaatttttgaaaacttttctttaagggtacttttctcacctttttattttcttccgcaagactttttgcatgaaaaattttagggtccatgattcaacaaaaagaaaaaagaaaagaaaaagaaaaagaaaagaggaaaacctcgccacactgcatttctccgcggagttaagcctgctttttattttcctctccccctttctttcttgcagcacctctgttccgtggaaatagcgggttttgtgtaaacacaagcggcatatcaaattcctccaattttccgcgtgggtgtgtgagtgtatgatactttttatttttatttttttttttttttttttgaaatcttgacatcgtcgtttttttttattttttattttttttttcttagataagcaaataatcataggtaaataatataatatgcttctacacttagctgtagatatacatgtggatgatatcatacaataggttgttataatcctactctatctctattttgcgttgttcttgttaacaatctcactgaacatatatcttttattaactatatacattatcgataaattgctccgtcaattgaacatttgttgttatttcataactactattcattttaataaccacactaccaagaaatgactacaaaaccaattgacacctttatattgaatagtgtaagtctttttaacgtcaatccatcacacagtatcatttcgatcacatatcaacctccagctataccaaatgattcaaatggttctcaagtttctggatctaaacttcctagatctaagagattcggtaaagttacattcaaaacgtctaatcatcatctttcatcgaattataaattcataaccaataaaaataaagatgtttcaagactattaaatgcaattggttcaaatggagtgtccattaaacctcaacatatattgaagaaaagaattaatcaaaagagacataaatcctcgtcatcgaaggataagaaaaaaatatctaattattctattactgggctagctactttattggccaataataaaatacctaaatatgattcctctataataaataacaacaaaaataataataagtctattaataacaacgactccactgtatcaaagaaaaaaataaaaataaaaataaaaataaaaataagaacaaaaataagaaaaaacattaattcattgcatttccatatcctaatctcttgtatttctatatcttcctatataaattgatgtttttctatttcatatacaaaactgaatataatataatgtaatataatttactatttagaatattatttctaatgttaacatactcatatgaatatcaatctaaacaaacgcacatgcacaaatagatatatatttcagaagagtcatttcttcttctttttatttctttttcttttcgttctcttctttttatgtaatttcttatttctcatctcttcatccttctttattatcattggtataaatgagagtaccccattattattattattattattattatcatgatcaccttgtaataacatattactattaccctcgataacatcttcatgatcgttcaaactatcctcattctcactaatatacttaggtggcagatcatctcccttctgtaagattatatctttgtttatctcaataccattatatgaaggtgggatgccaatttctccataaatactaccaaatgaatatttcttaacattggcttcaatgaacacgtatccaagctgtcctaaattaacattcaattcaattggatcactctcaatctcttctttatttatatcatatacacgatttaatttatccccaatgtctatggattcgccctcagacaactttcgtcttaaagcaatattatcaggatcttctagcaatccatctaatgtataagtccttgtatatgaggcattaaatgccccgatactcaaaaacaaatcaatatgaacatcctgtgtcacatcaatcacttttttaccattatgtgtaataaatattgcaccgctcctatatttataaccaaatccaactacatcaccttcttccaatacaggcaataaagttgtcgcactaaatggattatttactctcagtttcccggtggactcatatgctatagaaaaatctgccatccccggtggtctaaaatatgggtatggcaccgttgtcaaaccaatactgaatatactgttcgattttttattatatttaaatattttaacttcaaagtaaacagcgtctcttttattataaggtagcggaaaatttaatatagtagacgaacttttattatattttgtaaatgttatatccaatttatcttgaatgaaaaaacttggtaaaaaattgccatccttgtccacattatcattgatggaaggtaacaaaaaataactttgtattccacgatcctttaaaaatttcaaatcattatcactggtatacgaaccaaattttgttattataggtgggttcaacctttggaactctttagtcctttcatataaagaaatctcgaaattggatagcttttgaagttcttgattttccaaattttttaaagtctcaacattatctatgttaccatttgtatcaagcctcacactatatggcgatcgtataaacaatgaatttaacaatacatcattgttcttcctcctaaaaattccacttaagggtaatcttcggctttcaataccaccagaacgttggcgtaacctagattcttcatcgtaatgcgactcttcatccccactacagaatgttataaatgttgccaaaacaaccaatataatcattataatggcaaatgttacggaaaggcttattaaaaatgctaaacttatggtatccgaatctgagttaatatttgatccgaacccagggactaattcattttgcgtcgttatttcttgatgttccgatttcatagggtaaattctgtctacattgaaagtatctttattattaatgtacattttatcattcatatcgttttgtatagatgtatctaatataagtatcatctttcaatagtaacactattatcgtctgttaatcctaatcaatttctctggttatactaatattccacattaaaaagagaaatacataatactattacaataacctggtacaagctacggttctctcttactctgtgtctagatatattcatatgtattcttatatatttgagtaaatagatactattattaaagcacttgaggatttctattaaccatatgtattacttattgtttaagcttccttaaacttccaaattttgatgtagaaataattatagaaaaaaaaaagttttactaactttaccaaaacaaaattgttaaagccctaatttagttttaagaatattttataaaaaaaacacaaatattaataaccctcaatatttttgggaattttaatcaaaaaactcaaactaaagaaatattattgtgacacgaaccaaaaatggataacctttaagttaagataaaagttacgtgtttaagccttcaacatagtaataaattgcaatatcattagtagagaatatagtatacatagttatttaaatattatttccaaaataacaataaaataaaattttaaacggaaacttctatatttatatatatattttgataaaaaatatttaaataaatgcaattaagtatttaaataacatatctaaaataaattttaaaaagaaaaaaccaaaagtagataaggaaagtatattatgataagtgtttttttattttgtttaatatgcaaaatgttatgttttaaccttcatttctaagaatatttgtcatttcttatgattaacgatgtgtttaagagaaataattcgaaggaagactactaaaaaagcaggaaaataccttttctatttacctatttattcatctgattcatgatcactttctagatccccactagcttcactccattcaatgtagtaatctttcatcatttctttatagtctttcaagaaaagtggatcaaatgggaaataactttgtaaatcaataaattgctgtcttgtagcaagtgaccacactgttgttgatgatggtgctccactattggtccctgtggaagatgatttactatttttgttactacctgctttaccaacaatacctcttaatctctcattattattattctcaataatactgaaacaatatgcaatatcttcatgttgagctatccttgcaaacatcaacataacattttcgttacaatatttcagtggattgaatttagatataatcattctctgaaaaaatttgtctaattcacattcccaatttccatctaaatccttaaaaatatttcttctgaaacaaaaaatataacatagtgcttgaaatgctgcatagaaatgtttaaacctttccatacctcctggttgatccacctcttcttctctttcaatagcatacctgtttaaccacgaagtcaaataactagcaacaaatataatttgagtccttgatagtttcttagcacgcgcaatgtatgaacctaaatattgtaaagacttaattttcttttcagaagtctcatggactgcaaatgatatatcaattaaagtgacaagaaatgaatccatcaattctaattgttgttgtgataaatggaacataatatattgaatcgatcttgtgtaataagtgggcaaaatatgtgtcttaaacaatgtagttaaagtattgaaaactgatacaccttcaccattctctaaactttccggcgtcacttcagaactaatattttcactaacaagagttaaaatagcatctaattttgtagacagttctttgatattttggttaatttccacattatattcctcaacaccttccaactcatcattatcgtcactaccttcgccttcatcttcactattccctaagtttatatcttcatcctcatcctcatcctcaccttcttcaaagtcactatcaatatcatcgtccatttcatctaattcattttgtaactcaacatcaatagatataatcttttcaatgatcaatgaccaaatttggaaccgtaactctttacaatatctagtcaaatgtaagatattggaaatataattaaccaaactcttgcgagtgtcgtttttattagggaaaaatctgactaaataagaatcaatgaaatgtaaagaacttggtatcacacctaaaaaataatttaacaattcatgatgactatccgcagccttcaatgacaaagtagagaaattggatatcaaattcattgagacatcttgccaccacttaggtatactagaacaaagaattttaataaaatgtatatacttagataatgtgacagatggtaattcccaccatctatttaaagttattaaagattgaatcaatatgatccctttagaggaatcaattctattgatgttactagaaagggtatctaaaagaatatttaagttatctggtttaatcttctcagtacttttattgtcaagtgataattggtccgcaattacattaatatgggtagggtcattctgtaaaaagcaaaatcataacaatatggaaacggttattcatacacgtggatattagcacaaatatatgatacaattattttgttagtaaaaaagctttatcaacaatttagtaatatatgtgaggcatgagtaaactaggaaacttcaattatatttttttaattaaaagaaaagaagcacacacagacacacacaacatttataattactttgatactatgtatcaaaaactttcccttgataccatcctataacaatacaagtcatagttataatataatatgaaataaggaaaaagaaaaacataccttttcaagatcatctaatgctgatttcacaaatcttgcatagatagcagaagaaaattcatgaagttcgccaccatttttaattttatcttcatcattgtcatttggtatggggtataagcttacatcttttgcaaattccactttccgttttttagaatccattggtgttattacttcctgagcagatcgtttaacagtattttcaaatgccatcattttgactgatatgagactttatatttttttatcagttgcaaagactactaattccatatatttcttttgcactttactatcgttaatattgaatgttaaagatatcaaaacattattagtttttaattatgaaatcttcaatgtttcgaaatttactcaggtgaagaaaagttataaaataaatcaaaagtccctttcaaaatttgtgatgctcatcgccttttcacaacttttttttccccagctttttccctttaaacaatgtaatgaaagaaaaattttcagatttcccgggtaaccccttcaccaataggtaaataaattattactaccatcatcataacaactgcaattacttattggtgaaagttagaattagaaaaagttgtttaaggaggaaagccttgatgatcttttaatagcgagttcgctactactatttcataatggttatccaatatttttgtctttccccgcttaggcacagttggtattttatgtataaaatcatctatctaataatgaaaacactttttgtatgtatatgctgaattatataaattaaatagtgcaattctgcttattccataactgacatgtattttaaagtttgatatataaatatatatccacaaatacatatatatactgattaataggtaattccaaaaatgggattagaaaatattacaataaataatattatccactaacgaatgcttctaccttgaaccatggagttacccaattgttcattaccaacataagtccatccaccaaattgtttttgaacactttcacttaaaaactcatcgactacactatcaattggctgttctttagtaaattcttgatcaaaattacttgtatccatagcgctactaactggtggtttaaatggtgggatatagcctttcatcattagtcttctccatgataattggctgaagaatggatgatctttaatctcttgtgcgccgttacgacctaatcttcttgaaggatctctacttaaaagaccaatcaataagtccttagcatctctatcgaacccatctgggaatcttaatggtgcctgtaaaatttttttgtacatctttggcacatcttcatcatagtatggcggaagaccagttaacatttcatataacaatataccaagagtccaccaatcaacaaccttagagtacccttgtcctaacaataattcaggtgctaagtattctggtgtaccacagaaagtgtctgttttgtcattatccttcatattcagtttacaaagaccaaaatcacaaagtgcaatatgaccttgataatctaacaatatattttctggttttagatcacggtaaataacatccaaattatgcaaagtctccaatgcacataacaattctgcagtgtaaaatcttgctcttgataaatcaaatctaccttccctttgtaaatgataaaataattcaccaccattaataaaagctaatactatgtacaatttttcaggtgactggaaggaaaatttcaatggtacaataaatggacaatccactctagccaagacagttctttcagccaaagtatgtgtcacctcagatttagaaacaatatatgactttctaagtgccttcaatgcatatatcttttgggtatcctttttccgtacttgcataactttaccaaatgaaccttttccaataactttcaaaaggtcaaaatcatcaatggataatggtttattttttgaaggcttataatcaatagtcaaattgatgttaccaaacccattctctaattcaacccaatgatgattgtacagtctaatatttgctgcagaatcaatctttaaattaactggtaaacgacatgaatcaagatgtatatcttgattagtattaattttttcaaagatttgtttcaacttttcattattttcactaacctcctcttgccacgctttcgatggtaaaagaatagatgggatacgagcaaaaacatcaatttttatatatggcaattttctagtaacatcaaaagttgaaattttattaaagactggtttcgccatagtaccatattcaggttcaatagtagccacagtgttatcaaattcaatagtgaagtataacagggggctagcattctgggaaccaggtagcataatagtagcaggaataaaactcgatgaattttcttttggaatcaacgactctgaagaagaaccttgattagataatgtgattcttgatatctgtgaagttaattggtcaatatcaatatctgcattaccttgttgtactggaatcccagacgacaacaatttagttaaaatttgatcatttgcagtaatattaaatggtagattaaatccatcaccattataaattttaatagtcataatgccactacttgaggtggaagtatttgagacatttgagtgtggacctgacttttctgaaggtgcatcattatcatgatttttcagatcatttcttgagtccacatgctgacgtgtatgagcgttatcaccaccattaaaggtagatacagatgatacaccatcataggatgtttctgcctgattagtactagttgaggcctgagtgatggtttctttacgatctgaatctggttgtgtcacagtatttgaatgagatgaagtatcatcatttttgtttaaatggaatagagcactatgacgtttagcttctttctccttctccttttctttttctttctcttctttagatttaccaaacttgaatttactcttccaggaatacataacgtgcaaaaatagatataactaagccaaaaaaatatgttagaaagatctaatgtatctataagtaaagataatactattctgtatattcaccaatagatatttctatttgaaataaacaaaaaacaaacaaacagtaagccaagtaactatagactaaaccaatggaataaaatacagataacacaaaaaaggtaaataaactcttcgttaacagtgacccttatgactgtataatttcaatcactaatggcttatttctatgcaacaatttgctaaatgattcgtttggttagcaaatagattatagcttgtccaggaagcactcatatttatataagacacttctctactatgtgtaagccagttttcaatcttgatagcaagaaatcaaaatcccaatcttctcaagatttctcgaaagaatgaaaatttcacaggacacaccaaaagggtaaaaagaaaaaaagtaacttccgcggaattattcggagttgtgtaatttgtgaaacccgccaaataataataataatttttgtacactaaattcctcaagagggcagtaacaaataaaaaaatattacgtcaattgatcaaccatcttggaatttctagccttgtgtttcatctttattcaagccactgattacacatccaaagcctattacctaaattgcaaccttaatcatattgatacaacataacacatttcttgcatattatctatttttttcttatccaaacttacaatttatgaaaaaataaaaggaaagatacatagtaaaaaaaaagaagacaatgaatatagattaacaaaagttctataattactcaactaatttattaactaatatacacatttataaagtttccattcaataacaaattgtcaaaaagggtaaggacaaacaaatgaacaaacgaacgatcaataacattaaccgaagctattttttgttcatgtacgaacagttggttcttcagtgccaattaattctttaaagtttaagaattcaacaatggattttatgattgggcttaaaaaaacatctgctgttaaaccataattcttggaatcatcagtgtagttttctatgtataacctgatggcagcaccagaggagccagtacctgataatctcaatacaaacctagcaccattcgacaatttgacataaagaccctgatgatcagatacagacccatctagatcagtatatgagaaatcaccagcatccactactgtcatagatggatcagttggaaatggactacctacaacattttcttgtgagacaaatttacttagtaaatcaataaccttcctagcatcttcagaactaacattttcatagtcataacgtgtgaagaatgttctcccatatttgtcccagaattcttcttgaatatttttgatggaagcctctttttctggattgtgtttattgtagatagccaaaacatttaaccaagccacaattgcccaaagaccatctttttctctgatatggtttgaaccagtaccgaaagattcttcaccacaaatagacaatttcttagcatcaaataaggcacagaagaacttccaaccggtaggaacttcataacagttaagaccatgagccttagcaacacgatcaatagccccactagtagggaaagaacgggcaagaccatagataccttgtttagagaaatatgggatttcattagcatattctgcaataatggcaacagaatcacctggcgatacgaatgcaggaccagcaccataaatcatgtttctatcaccatcaccatcggatgcggcaccaaattcgataccttcacgatcaactctatcaactaatgattttgcgtatgttaagttgggatcaggatgaacaccaccgaaatctggttttggatgccagttttgcaatacttcttccgctggaagaccaaattcatcaacaaagatagctttaccatatggaccagtaataccgtttaaagagtcgaataacagtttccaattcttagtctcacgctgtttagtaataaactgtttaatcaatggaaagtcaaaaatagtcttcaagaaatcgacatatgcactggtagtatcgacaatgtcaattaacaaaggcccgtacttttggtttggtccgatcttagaaagatctaaagttggaaaatccttaacgatcttataatgagttaatttcttggacacttcccatatagcgttagtaatagactcaggggctggaccaccattagccagattatatttgatccccatatcattttctggaccacctgggttatgtgatgcagtcaagataataccaccagtgatcttttcatgataggatctgatgatgtgggaagcagccggtgtggataaaagaccattttgaccaatgaccaatttcctaataccattggcagcaccaattgctgcaattttattcataatcacatcattatagaaacgaccatcaccaccaacaacaagaacggcgtcttgagaaccttctggaacagcatccattaaggattgaataaaattttcagtataatttggctcattcataaaaacagcagtcttcttacgaagaccagaagtacctggtttttgatcttgatatggttttgtaggtataatttgcacttcaaattgagacatggtcagcaatagttacaatgaccttctttctttattagtcttggcaattttgaacttgaattaataaaaactgataaattcactgataatcaatcttgcgccaaaaaatcggagaatctaaactttcttcaatgattgaaaaaaggcacaaagacatatgtatatacatatgtttatgtgtacatgtgtattagtctacattctaacaaatatttcctcaaaattcaagttccaatgtttatttttctttttctcttcctttttttttttatttcacgacactataaaaatgacaaagaaatacacaaacaaaaaatatatatcttttattgtttttaagggaaggacaatagaaaggtatacataaatagatcaaacaaaagaagaagtttgtttgcatttatttttacttgatatcttcttaacattcttttaatctcaaacaataacgtgattcttgaaggaaatctgaacaaatttcctcgagctggaactgcaatttgagaaattggttacttcactatagacaatattcacttgaaatttttcatacaaaaagtcttatggaagaaaataaaaaggtagaaaaaatgtattatttactctcaattattgtgctaatgttttttttcttttcctttcacttgttttctaaatagttagacttcaagaaagagatattaagtcactgagtaataataaagtgagaaattctaaaaaatgaacatctcagacccctcataaagtttacaggaaaatgaatacagcctgaactatatataccaaatccatgtaggtggttgattccgagatggttttttttccacaagccctcactctacttaacgatgatccttggaaaaaacacagaatattattttttgcccgaactgttttttttcaagggtgcaccatttttccaattttggttcgagcaaagttacaatgttacgacgtgacgtaaatctcaaaaagttataatgattctacttatactagacttatgcaatactacatacagtcgttgttatcattgtggaaaaaaattatatgtgagttttctatatgtatttgagatgtaacattgtaaatgttttctatgagattataatcatatttttattgaaacaagataaaaaaaacaatacaatcaaataataataataagtaaaattatgcataaaaaatgtagaaatgtcgctttggtgaagaatttttggatgattcttaactgctaaaaaatggaaataaaaagaaatgaaaagagaatgaaaagaagaacaaatcaaacaactgtaattgaaatatttcaaaatataatttactggacaacttttcactcgaactcattgatacacatacgtatctactcttgaaaacgtatttaccataaaaaaatttttttggtgatttatcaccctgttgcttttctagtgaatttgatcttataatgcaaaaataagaaaaataggaaatggaaaggaaaaaaaaagaaatctatgattagcaaatatttgtcatttttgaatagtttgccttttaagctccagagctaaataagaaaaaaaacaccagatcgaaaaaaattgttttaataactcttctcttctctctgatacgctactacgccttttaaatgtccttttctaaatacaacgttttcatattatgttattttagaatgaatattttcaccatcatcaaatttaactaatgtaaaaccacggtttaaattaagtaaatagaaacagatctagatatgtaaatctaaacattttctatgagacataacgatgttatcaggttttacaccaaagaaatcggccagttccatctatatgaacgcgtgtgcatgtgtgcatatatgctaaatttgctaattcctattggccacctaaactggaatgcagaaaaagtaaagaaaacaaggaaagctcaaaataacatacagtttctaaaaagtgctaattattatagtagcaaaattggtatttttattacaaagtacatgccaatatagtctcgtagatttcattactaagaaccttgaagcatggaacactctcttttcgatatttccttccttctctctatttatgttgccaatcttcttgtctagaaatacaatacagaaatacagatcattccaattatctatattgatgtccttaaaatttgaatttatcttaaagaaaccgaacagagtctacctcttcctttatatagataatatatatatttacatatatatatagagatagataaatgcttcgttctgtgcctacttttttttatttttatttttttccttcgaaaaagaatagaatttgctatttaatattgaataatcattttcgaagttactcgagggaacagatctttgtcaactagaaaaaaaaataagaaaatgcttcaaatcatagttcactcaaaaaatagaactaccaatcactctttagacgctaaggcgaaaaagaaccagcagtctctgaattaaaacccacaggagtaatgactattacaaaaacttttagggccttacctggctactttatagctttcccaaatgaaaatgcaaaaccagtagattcaagtaaaatcaatcatctagagttaaatgaatgtaaatcctggaaacaactatacgattccataccaaaagacacgccaacacatgagtataagatacttattgtggcaagacatggacaaggttaccataacgctgctatcgatcgttatggagaagataagtgggatgaatactggtctatgttagaaggtgatgaacatggtgaatgggtggattctaaattgaccccgttgggaaagaagcaagtattcaatactggttcaaatgtaatactgcctattatccaagatttaggatttttaccacatatctatttcagttcaccaatgagaagatgtttagaaacgtttattgaatcatggacgcctgtattttgcagatttttaccccctgagacagaggtgtcgcccttcatattggaaaatcttagggaaacattaggtgaacatacctgtgataaaagagtagaccattctattgcagtagaagaatatcaaaattataagatgaaatcaaataatgtgattacttggaaatattcggaaaattatcccgaggtagaccaattatggtctgctgattggagagaacctcaatcagaaatggatgctcgtgttaataatggtctaatagaagtatttgaaaaactaagtccagaggaaaaacttgtctctatcacttgtcatagtggcgtcattggaagtatattacgtaatttgaaacatcctgaaatccaaaatttagatactggaaaaattgttgctgttgtagttgaggttgctaagcactaaaattatatagcaaactttctagtttttatttgattatatataacacatcaacttttacatatatcattgaaattatgcttttttttagaaaaatacaaatataaaagatagaattaatctatatcaacaatcagacttgtaattatatatgccacaaagattgataagggagatgaatgaagggttttgaatgtatttatcaaatctgtatatctaaagcaataattgaacattttgaatcgttttttttttaccattaaattttttatttccataattaccacaacataattgggaaaaatacaaaatttattatccttcgagacacctgtaaataaaagtgagtcattaataatatgtctatatatgcacttacacacatacatatgtataacatgttttaatccaagatagaaagatgcggttggaacatgactcaagataagaaaccattaattcagataaaagctctaccaggatattttgctgcttatcgcacaactgaatcaaatgatatagattctaccaaggtcaaccatttagacctaattaatcacacgtcatggaaggaattatatgcaaatatcccaacagatacagatagacatgaatacaaattattggtattagcaagacatggtcaaggctatcacaacgccgctattctcagatatggtcaagaattatggtcaaagaaatggggtgtactaaatggagacgaacatggggaatggttagattccaaattaactccgttaggtaaaaaacaagtaagtaatacaggtaaagaagtgttattaccaatgattcaagatttaaaaattttaccccatcaattttttagttcacccatgagaagatgtcttgagacttttattggatcgtgggatcatgtctttaaagagttccctgaattggtagacaatcaaaaaccattacaggtaaaaatatttgaaaatcttagagaaacacttaatacacacccatgcaatgaaagagtcaatcattcaatcacagtgaaggaatatcaagactataaaacaccctctggagtaactgtccattgggattacgaagataattatcctgaagaggaccaactatggtctaccgatcactgggaaacaaaagaggaaatcgatttaagaatacgtgatgcgttaaccagcgtatttgaaaacgttactagtaacgacaaattaatttcaatcacttgccattcaaaggttatagagagtattttacgtatcactaatcatcctgcaatccataaactagatacagccaaagttgtttgtataattgtagagattgaaaagtaagatatatatatatctaagagatgcaaaaagatattacatatattatgtatagattatatatagatctcgttcaagaattagagttttgacaatccaaatgctatcacgactatatcagccttattgacaagttaagttttaaggatgtttgccgaataatcttcaaaaactgtttgaataaaagttttcattgatcattctaaatctattggtgattgtagaacattttttataagaaaaatttaataaatataatgtctttcatctttttgcatctatcttctgactaacaaaggataatagattcaattatcccaactctgttgttgggtttactccatctgccttttatcattttaattcgattatctcctttacctgcagaatattgcaaccctttttcttttgttactattttttcggtttaatttgtgatatgatgatctactgttcgatcattaaattgacagtcaatataaccattataaattaaatacatatatattatagtgtctatataagtaacaacgctgttctataatgctatttcttacaatttaataacgcaaccattaatgctactgctctgatataaaataagatagacttgctattactattgtcaagaaaaaaaaaaacaaatagtttgaatcaagtgtactgttttattgtcataacagctatgaataagcaaaagattcaactatatcaataaaaattttaacataattaaaaatacaattctattaaaaaaggcttcttataactattctgctacttatttaacaaaaccatttttttcgaatcatgctgtacaatgattacatctttacactgcatttactaaaattgcacatatcgaccagagagccaataaatctaaatcaaaatttttatcagattataatctacccttgagtaataagtctttaaaacaaaacacatcactaatatgggaaaaatctgatcttcaattggatcattaatttatatatctcacaggagtccaaatattccatgaaatgatgatcagacacaaagttgatattgacgttggataaccaaaaagtgttctcctacttgtttatgacgttatacatgacaatggtaaatataagtttatgttacgaactcacgaacaaggtctaggtcatatgggaaaaaattatgctcttacttttggaaaactagccattatcttagtcatatcaggtccagatactacaaatgtaacgacactagtggctaatatatttgctgatggaatatctatgattattcccactagccaaatatcaatatctgtaattgaaacaggtgcctatcaagaagcagacatccttagaatatccaagcattgcattgaatggaatataatagtaaaaaatgtagatgaattatctaaaagaatcaatcaagcttttgtgattgctatttcagaaagaccagctcctgtccctataagtttttttaaaaatatcactactataatttcaagaaaaccaatccttttgaaatatactattcctaaaaatttagataatcatcttctcagtatattttatcaaaagacattaacaaaaatgtaaagaaaactgtatatttgattgacatttcatgaaaccctgcatcatatgtgggaattgaaacaattaactgttcagtttattgtcaacaagtggtacataaatcatcaagctaaatatatttgtaatttttatcaacagttatgtctcatgtaacagaacttcaaatgagctaagttctgctatgcaagttaaaattccaactaaatttttgatttaagtaattgtgaacaaggcatgataacccaacggcaatatttattttataatgaaatccagaccttataaagttggctgaatcaaagcatgttaatggtaccaaagtgaaagggactattcacttagaagaagctttatggatgcttatatttatagaatgttctatttttatggaaattaaaacagagaacgaatgcccattaaaataaaaaaaatgttagcttatatatagttctaattcaaaaagatataaacaagcttctcaattataggtatagaatgaaaaaggtctatactagagttatccattgatcaatagaagaattacattaaccccttttttgttcttttacctatattatatattttatagatatttctagaagcatgatcttattattttataaattttgtataaacgaaccttaccaatatcagcttctcattacagttatttatctgtcatattaaagaaatgacactaaataaaacataaaataattgttttgaaaaaaaaagagaaaaaatgtctgtaatattaatttttatagcaaaaaaaaaataaaacaaaacctattcttaaagtgacacaatatataaaataaattgttaattaagcaaactataccatacatgcttaacaagatacttaagttttttttacaatttatcaattttttataacaattaaaaccataatacaaatatcaaaataatatatatatatataaatcatatgtcaaatagaaattccttagaggctaacattactaatataatttttaacacctgtcaaattattgtttctaaaattaatgatacaattggatttacaccgcattttgtttgtgagattaatggcccttactatccatattttagaaaattaattaatttagtgaatcccaaacaatcaaaaagaatacatttacaattatatgcgctgaaaataaataataattcaaaagaaatcaaatcacataaatatgtggagttttcaaaagaaactgtgcttgaatacgggttaaaaaatgttaaaacaccatcggttgaagagataatagaagttaaaaaatttcaatactctttaacgaatagagctaacaataaagaattaaaaacaatggaaaatcaaacaaagtatcattccttcgatgaaaatattgttaaatataacaacaatactcgttttgagttacatttcccatatcctgtctctatagagccatcccttgatataaaggaagaaagtgactgggattctgacatggaacttggtggatggattatctcaaataaggctattacacctgattctgatccaccattccatcaatatactaaaaagagtagaaaacaccagaacaaacagaatttttcaatgaactatgataaatattggcatagagaaaaattggaaaaaaagagagtaaatagaaaaaaattctattgtaaggaaaaccattatgtagccaataatttacatttcaataattacaacagaacaccaatagacagaaagaaaaatgaagaaattgaaggattaattgcggcagctattattcaatctgagttaagaacctcaactgtatcaccttctcaactaaccaaaaataagaagcaacgattgggagaaacatccagttttattatcttaaatcattgtgattacaaaaatcttagaagaattgaagaagttacatttttactagtttttagtatattaaatggtgttttaaattttgaaaaatgtattatgcaagcttccaaaaacatcagcgcaaatgttagaatagccacagaaaataggcaagcttacacaatccataatattagtgatataattaatagcagtccctgccacttacatcgactttttacaaaatttactggaatcacattgaaggattatgaaaatctttgtttagaatttttaaatactaatcataaccatttcaaattactaggtgataatattaatttgtgggttaaagaatttaaaggttcactgaattttgatctgatattttcaacttttattagcagaaaatacaattacacaaaatttttgagtgatgatcctcaaaaaaaatttaattcctggtctttatatttattattaccgggaactgaagaagcaatatttagaaacaaagttcttttaaatcctccactgttaccaagtagtaggattaaccataaacaaagaagactacgagaaaaaaaaggtggtaacagtgggcccaatcaattccgaatctcagttggtcccttgaggaaaaagataagagcagaaatcttggacacactttttgtaatagacacttcaacttcgtgcaacactagattccaattcaacatagaaaaactattttctaattgttaaagggacttttttatttcttcccaattttcctaaaagctttttctcaaacaaacatacgtatatgtatagtgttatatccataaatatcaataacaaaagacaatatatattcatgacacctgtatatgtaatcaaagaactcttattatttttaatgaaacatatttttcctcaaaagattttacgagtatgcaaaacacaagtatgctatcacttattcatatgaacatgttctcttgttcactcttaatattatccataatatctctttcccagtgacatcattttgtggcgctgttaccttgacggaaaatatgtgtcacctgtaatttgttgtgtgactggaatgaaaaacaaaaaatttcgaagataaggaaaaaatgtaaaaatctaaaggtaaagaaaaagaagctgatcgacttccatttatcattacatttaaacgcaacgactagataaagcaaataaagcacatactgtgtttctataccaaattctagtcaaatatacacatctcaacttaattaaataaacacatcgaataacaaacatctaaaatttatatatatatatatatatatatatacattttatttcacaaacgaaacgttttttactcccttttattcctctctttataagtatacttacatatttccaatagaatatggctttattgaaaagaggggctcgtactaaaacagcagcagtcccacagaaaaggtctgctaaaatcaaaaaggccacttttgaatcaggaaaaaagaaggaagttggtgtctctgatttaactttattatcaaaaatctcagatgaagctatcaatgaaaatttaaagaaaagatttcttaatggaactatttatacctatattggtcatgtgttaattagtgttaatccatttcgtgatcttgggatctataaagactccattattgaggcgtataagggtaaaaatagattggaagtccctcctcatgtctatgcaattgcagaagccatgtattacaatttaaaatcgtataatgaaaaccaatgtgttattatttctggtgaatcaggtgcaggtaagactgaagctgctaagcgaatcatgcaatacattgctgctgcttccacttcacactctgaatctatcggtcagatcaaggatatggtgcttgctaccaatccacttttagaagcatttggttgtgccaaaacactaagaaataataactcttctagacatggtaaatatttagaaatcaagttcaattctcagtttgaaccatgtgcagggaatattacaaattacttattagagaagcaaagagtcgtaggacaaattaaaaatgaaagaaatttccacattttttaccagtttactaaaggtgcatctgaacaatatagacaaatttttggagtacagaaaccagaacaatacatttatacctctgcatcaggctgcacagctgtggataatatggacgatgttaaagaatttaatgaaactttgaaagctatgaaaattattgggctaacacaagaagaacaagaccaaatattcagagcattatctgctattttatggattggtaatatcactttcattgaaaatgatgaaggaaatgcacaagtgagagatacctctgttacagattttgttgcatatttattacaagttgatgcacaattattaataaaatcattggtggaaagaataatggaaactaatcatggtatgagaagaggttctatctatcatgttccattaaacattgttcaagcaacagctgttagagatgccttggcgaaggctatttataacaatttgtttgaatggattgtggatagagtcaacatttctttacaagcttatcccggtgctgacaaatccatcggtatcttagatatttatgggtttgaaatttttgaacataattcttttgaacaactttgtatcaactatgttaacgaaaagttacaacaaattttcattcaattaactttaaaacaagaacaagaaacctatgaaagagaacaaattcaatggacacctatcaaatatttcgacaataaagttgtttgtgatttgattgaagcaagaagaccaccaggtatttttgctgcaatgaatgattctgtagccacagctcatgctgattctaatgctgccgatcaagcatttgctcaaagattaaacctatttagctccaatcctcattttgaattgagacagaacaaatttgttattaaacattatgcaggggatgtcacatatgaagtgaatggtattactgacaaaaacaaggatcaattacaaaaggatttagtggaattgatgagtaccactcaaaatccatttattcataccatctttccagctgaagttgacaaggattcaaaaagaagacctcctactgctggtgataagattatcaagagtgcaaatgaattggtagaaactttgtcaaaagcacaaccttcctatatcagaactataaaacctaaccaaactaaatcaccaagtgattatgatgaccatcaagtgttacatcaaatcaagtatttgggtttacaagaaaacgttagaattaggagagcagggtttgcttatagacaaacttttgataaatttgtggaaagattttatttgttgtcttcacgttgttcttatgctggtgactatatatggcagggtgaaacattagatgctgttaaacacatattaacagatacagcaattccctcaacagaatttcaattgggtaccactagtgtttttattaaaacaccagaaactttatttgcactagagcatatgagagatagatactggcataacatggcggcaagaatccaacgtgcttggagaagattcttacaaagaagaatcgatgcagctactaaaattcaaagagctattagagaaaagaaagaaggtaacaaatatgaaaagttacgtgattatggtactaaacttttggctggcagaaaggaaagaagaacaatgtcattattaggctatagagcatttatgggagattatctttcatgtaatgaatctaagacaaaaggttcatatatcaaaagacaagctggaattaaagaaaaggttattttttctattcatggtgaagcattacattccaaatttggtagatctgcacaaagacttccaaagacttttattgtaacaccaactgctttctatattataggtcaaacaatgattcaaaattcaatgaaatatgttgcagaatacattattgatgttaaaacaataactcagttgaacatgacaaacttgcaagatggatggataggtgttggtatcaccgatgttaataaaccagatccattgatcaatacatactttaaaactgaattagttacccatttaaaaaaattaaatagttccattaaaattaaaattaattctactatagaatacagaaagaaacctggaaaaatgcatgtagtgagaagtcaaattaatgaggcagcacctaagtatggtgatatttacaaatccagtactatttctgttcgtcgtggtcaccctggaaactcttcacaacataaaaaaccaagaaaaaagaaaattggcacacatacatacatatcaaagccagctcataacaatatatctacaatatccaagctctctacgcaaagcaatactgcgccagtacatcatactcaacaatcaaaacctgctgcaccaatcccaagggctactaccaagaagagagctccaccaccaccggttatgcaaggtcattccctagcagctagtgcagccaaagccgtttacaaccctacaaataatacctctaatactgctgcttcaaatagtacatctacatctgcctcaaaaagtctaataccacccactagcaccactgcacataaaaaagcagcaccaagaccaccatcagccaataacttaggtaatagtcaagctcagtctaaaacacaatcaacaccaaaaccagaacaacaacctgctgttgaaccagctacaacaacaacccagaagaagagtgcaggaccaccaccaccacctcctcctcctccaatggccaaaccatcggaaccaaaattccaagctgcatatgatttcccaggttcagggtctccttctgaattgccattaaagaaaggtgatattgtctatgtaagtagacaagaaccgagtggatggtcattagccaaactcttagatggatctaaagaaggttgggttccaacagcgtatatgactgaatataaagaaactttaccaacccaagtacaatatactcctgttccacaaagcactgcatcctctacaagccagcaacaagatttcaactcaacaaacacttctattgcaggtgctaccaccatgtccacacagcagagctttagtgatggattagcatctgcactagctgcaagagccaataaaatgagacaagagagtggagatgaagaagaacaaagtgatgatgatgatgattggtaaaaatatttatgaaaatgtcaaaaattggagatacagctatctatatggacatctaatataatattgttatatatacatatacatagcctttgtttatatattttaggactcaatgacgaaatgctttcgattctatgtaatgaataaaatgataattattgacttaacttttatttatattgataactagtagttaaaatactctattagcttattataaacaagaaaatacgtactatttatattttcacagtaattctacaatgtttttttatttctttttttcgcactttagtgataatatctaagtatttggatttatttcagtgaaaaaaaacaacgatatatacacatttagatacgaaaaaaatatatatgtggtatattataaaggagctcactttacagtattagttttaaaccggcaaggattatcaaaacaaaaaataattgaacagaaagatattatagagtaatacagattattgaaacagtattgctatcaatattttgactgattacgagaaaaaaaacctgttataagaaacataaagcgaatataaacaaagattgataatgatggatagctttgatgaagaagaatacggtactggtgagttagttgttactgatgacctccaatttgcatttgaatctattattgaggcattttctaagtatttatcactttacatacatgtattaaatagatttattaatcatttacgtcgtgttggatcattaaagtacgaaagaactaacttgataaaatttgtgaaaaagttgagacacttcaatgacactttacaaatgattcaaaataatatatatgaagatgcccatgtaagtgatccattagaaaaaagtgtagtttatatggcctctaattttgtgaaacttttggaagttatagatcttttgaatttcatttttacaagttcattacaaaaagaaattatttcaaagacattaaattttgatttaactctttgtgaggaatgtatttctagtattgaagatacatacaaagtttttgttaaatatacacaatggatggtagaatctatcggtgtagaaaacccatcaatacaactggaagtggttagtacagcattaaaatatgcagctgaagatcaagaaaatgagaattatgatggagaaactgataatatttttgtacaagaaattatggaggtggaggattccattgaatatttaaaattaactcatgactgggacacgattctccgtagtcatataaaacgattagagaccgagtttgacgatgccgcaaataaatggcaagaaaagtttggcaaaaaaaaataggctctgtttaaacctaattgtatggtagattgtataagtaacatgctgtaacaataacatcatatagttacaacaaaaagtaattcgagtatgctattataatgtaacatttatagacgaactgttaaatattgatcaatcttaagtaaaaaaaaatatcaacttacttttgttccactggaaatagtagtttatagtcctaataacctgtcttctatctcatgcacttgacagattcagtaatttagcaattggcagtcgatgccgacattttaaaacctgtaaaagcctgctattttcctacaagatcataagtggggcataatttcggagaaactatcaacttttgagtttatccggtcgagagattttttctgttattaaaatcaggaaaaacattcaggattgagaggggggggggggaggagaggagggaactttcgttttgttattcctcgttacagtcgagtgttattattattatggtcgttaacgatggtgatgaagcagatgcttagtttgtttttgaatgaagaactaccccattttattctggcacgtgtgcaagaaaatgcctactagtcagagtttttcaaataggtaaatatgggaaattcctatttgctaatttgtttatttacgtaactataatgctagtaaaactttgagtctaagttgcataagacaactagctacacatatatactgatatttaagtccagagttgaacttagtgaaatatcaatgagtattgaactaggattatctagaatcacgaagctgttatcgcatcttggaaacccacatgaaagtttaaaagttctccatgtagctggtacaaatggtaagggatctgtatgtagttatatctccacgatattacaaaaccaaaaccaaaaccaaaatcttcatatttctcagaatggtcaatttattaaagtgggtaagttcactacaccacacttgattcatcttacagattcaattaccattaataacaatccaatcccacagtataaattcgattcaatcaaaaaatcattaattgaaatcaataataaatattctatcaaatgttcagaatttgaattattaacgtgtcttgcatttttatattttaaagaagcacactgtaattggtgtgtattagaagttggtttaggtggtagattagatgcaacaaatgtgatacctggaaaaaataaattagcatgtggaataactaagataagtttagaccatgaaagtttcctaggcgatacattgactaagattgcatatgaaaaggcaggaataattactcctggtgtaaaatttgtttctgttgatggcacaaatgatatcaatgttttaaagacaattgaggaacaatgcaatctgatggggtgtgaaatgaaaattaccgatccttacaaagacagtaatataatagaaacagattcttgggggaagattcaaatagaaaaattaccattaaatggtgaatatcaaatatttaatttaaaagttgccatatccataatagatcatcttcaaaagataaacgaaataaagctttcaaaagaggatttattgaagggattgtataatactgtatggccaggcagattgcaaaatttagattttacttatgaaaagggaagatcaattcatgtgctgatagacggtgcacataatgatagtgctgccatagaattgtctaaatatatcaggaatacatacggcgataatccaataacatatatcattgcagttacagaaggtaaaaatataattcatttatttgatccacttttaagtgtaaaagatttagtttatgttacaaagtttggaaatgtggaaggtatgccttggatccatgctacagatccggaaatattaaaacaacatattcaaagtaggtacacatcaaatgtaattgcagaacccaatatccattcaatttttgtcaaactggctggtatcccagaaaaggatagacaacccatagtaatatgtggttcattgtatctatgcggtgaattattgagattacataataataataataataataataataataataataataataataataataataataataataataataataataataataataataataaccagtaaaatatatataataaaagttgattaaagttgattaaagtttttatccaatatatgcatatggctactaaggttatggattttccactatcgccataataagcaacatgtgtcagttactgtgtttatacatacatatgtagttagtatcgttttatttctatgtatgtagataataagtgtccgaatatgattcaaagattaattaagtagggctaatagatatgctctgttgttttaaatcatttttttatttatacattaggtctatatgctttttttctcctatttgttctaattttattttagaaaagaaaaaagagtacacaataataaaatagagtcagaagagaaaaacaagtgaagaggctgcaactattcaggatatgcaaatattaaaaacatatatatgcatatgcgagtttatagattttaaagaaaggagaactttttgtaataattaagagggcatataaagaatattgtttatcatctgtacaataattgcatgctctcattagtctctgatatagaatcaagagcaagccagtagaatagaacggagtttttttttttaaaaaaaaaataaatgtttagttgtatcaagaataataatattctcttctcatcagtcaatattccaaaaagatatctaagatgtatgtatttttcttcttttagtagaagaatgtattcaagtacccctgaacaaactaaatatatcagcaagagaacattgactatcattggattaaccacaatcactggatatggcatctactgctatttttacctacataacaactatcctagatcagtaagtaaaccattgagaaatgcactttggcaagaaagaaaatttaaggattttgagacaagcataagattttatatggatgctttggaagaatgtaaaagattagaaatgaataagcttagtaatgaatatacaggtgttgagattaaaatggccgagatgtatgaaaaattgaataatttgtctgaagctaatgaaatatatttgataattttgaatagaatatataacacattgagtacagatagtaatgctggacaacataatgacaacacaattgaacaatctataagggaaaatttgataaaaaaggatttgagtattttaaataaaattatctccaatcaaaatttgcagaacatcaaatccaacgctatatataatcaacagcttgatgttattgaaactcatttgaagttagcagaaaacgaggtttatagaaaaaatcctgacctacaaaaaataatgcaaaatgacagtgatccatccttacttgttaaaggtaatatatcttcgaataagagcaatgaaagtgaaagagatttacaaatatccattaatcaaagcagactaaaacagtttagtcatgtattgtcaacgttcaaggaagaatattttgtgattagagatttatatacagagacttttctgaagaaaggaaatataaatcaagcagtagaatctaaactagttactattggatggatgatattaaccaatatgtcacaagggcaaatcttattatcacaagccaatttaggatcattgctttacatgaaagctgaaaacattgaagctcatattcttcatgtgaaagaaaaatgtccagaaaaaccccaattaataagtgaaatggaacaaaacagattatttaccattaatatggccaccaggtattacgaaaatgtaatttataacgcaaaatcaggtaaggatacaaattcaattcaatcgatggatggaactatttcacaggctatctgtctatctatatatggattaggtattatcaatttacatgaaaatagaataccaaaggcaaaaagattgttggaagaatcgataaatttatctaagagtattggatttgatgaattatatcaagaatcaatgctagagtatacaaaattgaaaaaactattggaagtgtgataacatgactattaatattgaacacaaatattattgaacaatatttcttacttatatattcatatcactaaataaatatgatattatattgttaatatatcagtataatcatgcacatctattacctaatgttgttcttaacatatttttcatattcttcatttgggtaaattgatatttaatatacattcttttttaatatgtttttctctggtatttcttaaaagtttaggttatcacaatttctttttatttttctaagtttttgcaaaacttttattaggtcaagtaaaaaaaattaagatttggttactcacggcagaaaaagaaaagagaagcatcgagaagcaaagccaaaactatatacacaaaagaagaggtgctacaaatccatattaactaatatctggttcataatctaaacaataatatatactgataataatattaattcaaaggtatatagccctgttagtaaagaaatacaaaattattacaaactaatagatattcgttgaagacaattggagacgtgaggagaaaaaaaaatgaatatatcacctcaattacagaaacagttatgctggaaaccaatattttatcgttatattaagaatagaaccacatttacccacattacatataatagatactttattcaagattcctatcttgcccaacaagcgattgatctaaaagaagggtttgataatgaaaaatattggaaagaatgtaagtccaagctagaaaaaaaaatatcctcaaaatgaaatgaagatacaagacactgttaatacggattatggtagtggtaataaatctatattttccaaatttagaggcactttaatgagccagaaatcgcatggcttatttaataacccttatttgaatagtcccaatgggctaagacagtttagcaaaatatctctacaatatgcgaatggtttaatacatactttaaaaacagatagaagtaaagaggggatgattcaatacattctaagattagatcagttaagtgatactttatgtcgagttattgatttatgtgagttcattcgatcagttcatccagacaacaaatttgtaaaagcagcacaaaaatgtcacgaagaaatgtttgaatttatgaatattttaaatactgatgttgagctctgtcaaaaattggaacaagttttaactgattccaacattgtatcccatttatcacaagaagaaattaaggttgggaatattcttctcgaagattttaaaaaatccgggatttatatgaacccagagacaagagatcaattcatatcattatctcaagatatcagtgttattggtcaggaatttataaataatgtagacattatacctgatacatacattaatgttccagttaaagaacttgatgatgataacctgagtcctgttgtgttaaaccaattgtcaaaggatgtaactggatattattataaaataccatgttatggttctatcccattaatcatgttaagaacgtgtcaaaatgaagatattagatgcaagatatggactgctttacataattcatcaaatgaacagattataaaattaacacatttaatgaaattaagagcaatattagctagaattatgggtaaaaccagttatgctgcttatcaattagaaggtaaaatggttaaaacacctgacaatgtcaaacaatttttggagagtttaatcaaatatacagaaacagctacagcaaaagaattaaaaccaattgcagagatgaagtgtagattgttgagacaaccatcacctaaaactaataacgaaatatttaaaattgttcgtccttgggatagagattattattctttccaactgaaatcaacaaaagaacagcataaatccatgcatttaactccattaaatacatatttttctttaggctcagtcatgaaaggactatccacaatatttaaccaaatctatggtatacactttgaattgtcccccacagaaaccaatgaaatttggtcttcagacgttagaaagattatggtaaagtctgaaacagaggatcctattggtataatatattgtgacttgtttgaacgtcatgggaaaccttcaagtccagcgcatttcacgatatgttgttctagagaagtgtatccaaatgagaataatcaaaatattatgcaaattggggttgataaaaatggtagaaaattccaattaccaataatatcattagtctgctcttttagtaaaagtcatgaaaatccttgtttgttgcatttgaatgaaatagaaaccttgtttcatgaaatgggacatgcaatgcattccatgttgggtagaactagattacagaatattagtggaacaagatgtaccacagattttgtagaattaccaagtatcctaatggaacattttgctaaagatgaacgtatattgtcaaatattggaagacactatttaacaggagaacagataccaatagagctattaagagaacaattaaaagaatcatcatcatttttgcaaaattgtgaaacatttgctcaagcaaagatgtcattactggatcaaagactgcatgatgaagaagtaattgaaaatattgaacatttggatgttgttacactgtatcaagatcttgaaaaagaattgaaggtgttagtagacaataaaacaaactggtgtggtaaatttggccatttatttggttatggtgcaacatattacagttatttgtttgatagagccatcgcggccaaggtatggaattatctgtttcaagccaatccatatagtcgtacaagtggtgaaaaattcaaaaataacgtgcttaaatggggtgggttaaaggatccttgggattgtgtggcaactgtattagatcagccagagttaaagaaaggtgatattaatgcaataaaatacattgctgaagtgaaagatttatgaaaaaaattttcgttaaactcataatatgtatttaccaactttaacgtctgtttttttctccccttgtacatataaatatacctattctaatttatttggtggtatttatttagctattttactatgtaattattttattcattagatacttatttattgatctaattgtagattggttatttatttcctttcttatatatattatttctaatcactgcatcttcaggtatctatcatacctgtcactgatcttctttcatcagccaacatcttctcttaaagtgtctcttagtagcagatcaaaagtcatcattcgttcttcatcattgctcgctatttacgagtaatttttcaatagggttttatttttttataagagacgaaaaataaaaataatgaagaacagaaaaaacagaggttgaaagttgaaacaaaacaagttatacacaaaatatatataagatacatataacattaagcattcatagttttacccttcaaacgaatcaaacattattgcccttttcttaggtttttttttttgataagcaaagaagacaagaacagtagtcctgtgcacatctgcatacataatatttagtaatatcaatatactatataatagaagtttaatttctgggcatttaactatacattactgatattattataatgccaccgttggataagaaaatcaaaaagtttctaaagaattctattagagtagctcctaaaatatcagataaaggtgaatttggagaattaagagctggactagtctcaccataccctcaaacacgtaaagatgcaattaagaagactattcagcaaatgactttgggtaaagatgtatcacccttattcccagatgtgttaaaaaatattgctactatagacatagaacaaaagaagttggtgtatctttatgttatgaattacgctgaaatatatccagaattatgtatcttagccgttaacacttttgtcacagattcacaagatccaaatccattgattcgttgtatggcaattagaacaatgtctatgatcaaagtagataagattttagaatatatagataccccattacgtcgcacgttacaagatgataatccctatgtaagaaagacagcagtcatttgtgtggccaagttgttccaattaaataaacaattatgtgttgaactgggtgtattggaagatttagccaacgctttagatgatgataatccaatggttatttccaatgccatcgcttctattatagagattaattcaatagatcctactgttattgatctaataaggttaattgaaacacatgtatctaaatttttattagtactaaatgaatgcacagaatgggctagaatgacaattttaactgccttggcagagtacaattcaagagattcattggaagcaaaagatattattgatagagttacagcacatttacaacatgtaaatccatctgtcgtactggctacagtgaaggttatcttaaaaaatatcacccaattagatccaaatcaatattctccagattctaagataatgaaaaagatatcatccgcattagtctcgttgatgtcaacaccaccagaattacaatatgttgcattgaaaaacatcagaatcatattggaaaaatatccagaaattttgaacaaagaattgagaattttttatgttaagtttaatgatcctatgtatgttaaattagaaaaaattgaaattttggtaaggttagtagatgtatcaaacatcaaacagtgtacacttttattaaatgaattgaaggaatattctatggaatttgaactagaatttgtatcacgttcaattcaagctatggcagagcttgggatcaagaatggaaacgaaatatttattgctaaaattgcagatattatatgtaatgagatattagaacgtggtggaggtattgagactatacgtgatgactgttgtgttgccttaagcaatttattaagatgttgtgatatgaatgagagtatggttaaacaaatatgctccatattaaattcatggtcatctccagaagatattttgacatccgatctaagtaaatgtcattatatttggttgatgactaaatatccaaatcatttcacaacagtaattgaaaaattaaaaacgtttattgataattttacacaagaggaatcaatgacccaagtggcgatattattatcagttataaaattacatacaaggcttgaaggtagtgtgttacaaaatctatttgaattggccacgagttatgaggctgtagatattgatgtgagagatatggccatgatgtattggagatgtttttctatagatgattcaaatgttgaaaaggatcagttgattaatgaactttgtaacaatggtttgaatccattgccaagaattgacaacatattagagatgttttctcctgacacgttagagaaattattgaaccaattaggcacaataagttccatatattttgagcccttgacagaagatatattaaatgaatcaagaaaaagaagaagccagatgaatcaaaacataatcaaaagtcaaaagttaaatgacttgcaagatattgcaagaaatgaattattagatgggcatgaagatgtgttattggattttggggatgaagatgatagttcaagtaatatggcatctagtaataataacaataatactttaaaggaattagatgacttgtttggtaatataacccaagatgtcaaaaacttgaacatatcacaacaacaatctaatacggattcaaatcaagcaccttcagcaaatacaacaacatcaaatacacaagatttattagacttattttgatacatacatatatatagatgtatgtatgtatgtatatacaaaaaagacaaaaaggtatgcaagtaagagaaaggctacaaaaaagtgaacagacaagcacatatatgaatatatgttaaaaaaaaaaacaaggcaactaggatcaggatagtatataaaaaagaagtttaataaaatcaatatatatatatttatatttatttacaaaaaatggaaaagataaaagtcattaatgatataaataattattctaataatagaaaacattagaatgctgacaatgatagtaaataccaatcaaatcataggtctaaattctacaaataagtgtatatatacagctcttttttattttattttattttatttttttaaaagagaaatttcatccagaagattgcttattttgttgtaatcttttttcaatcttatttaatattactaaatctctttgttcatctaaatattttttatccaattgataaaataatagacattctttcattttttctttctcagaattgcaagttgggaaaactttaacaccattgagctttgcacaatctgccattgctttgacataatcattacatttttcataagtaaatttcttcaaattttttcgagcttggatctcttcttgtggtgttagtacccaaatgggtaactttgcattatgtttagatacagaagttgcaatatcattattagtgcttgttgtttcttggttggattcctttatttgtgtcattattgttttccacttttaaatatattattgaatataggctagggggttaacaaattgaaatataagagcaaaaaatgataaaaaaagttaagacgaagtgtgaggataggcgtattaccaaatgaactaggttatcgagttgtattgtcctttacaatgaatataaattgatagtatctatgcttaattcgttttttattttttctttttttcctctgaatatgtattggaataaattaagtgataatttcacttagctcgattgattagttcttttgtatattgttttttttttttgacaaaataaagggaggaaagatcgaaaaaaagaaaagaaaagaaaagaaaagcaaaaaagcaaaaaaggcaatgttgaggaatttagcgggatctcagcggagcttaacggattgttgcggatatttcggatatgttggcggtataaacccgaaggttgctgtaatatcccggaaccgggatatattaccatacagttttccgcacatgtatttgaatagcttttttttgcctctcttttgtttttgccttctccttttttgtgtctgtttgcttggcggaatgtaatattctgtattggcagagaaagttcgaggaaaaaagtaaaaaaaaaaaagaaaggtcttcccaaatagaaaacactaaaaataaaataatttaagtctatatagagatggggaaagggggataatagatcttatagaaagaggaggccaattaattgttcttacgtttttattgaagtaattagtctatagttggtcataggtagtagcaagtcgtgaagacgaggaaaggagaatagatatcacaaattataattatacctacatacgtaatgtttggaccatttaaaccaagtagtacattattaggtggactgttatggaaaatcccatggagaatgtctatgggtcaaaaagccaggcaaaggttaaggctaagacaagtagataatgttattaaacagttgactcttggattacatgtggcacgttgtgagacaaagggaattcagtatgatgacgctttaaagatgagaaagaaatttaaaccacgaagtaaaatgttacgattatataataagtcttctttcttcccaaaggaagaacagatgtcctcaaagaataaatatactgtttttgatagagaggagagagattatagaaagggaatacataaagttcctaaatggacgaaagtttcgtgttcgagattaactaagtatcattaaaaatttagttcaattttataatgttatttgacgtatccatgttagatatatttatatattttcatgtaaataataaatagattgacaaatatattacttatgcattccatataattctttttattctaatagataactataataggcattaagattgatatatagagtttctcagtttatagcacttgcctatgaccactatcccttattcataactggtgttacatatttcatctaacattaaattgtttcttttattgttatgccagtttttttttttaattttctttttttaaatggatttaataataatcttcttttaattaaactaatttaaagatttttaatatcgaattctattttgcgaagaaaatgtatattggacagcagctttatatacctagtcaaagcaattatttgttacctaaggaataaattcagttgtgggtgagaaatgagttcaaaagatagtcaatatttatatctagcacaacaactacaaacattacaagaaaatttgcaaataacgagaaatgaattgaacacaatgtccacacagtgtaacactcatatagttaatcaattaggtagaattcacacaagttggttcaaatcaacaaaccaatggttaggtgtagaattatcaaagaaaaaatgaagttagcatgctttttttttctttttaaatctttcagccggctttcctatcattttttttggtgaaagtgtaataagtacttggtgcctaataacgaatttttttttgtttaattgtttatttgactgtatacgtgtatatataaatatgtaagtagatatatggataatttaaagatatatatacttcttctgattttaattttttaacaacttttctttttctttttccttctgctgtttcttagctaactttacttcatattcatggcatccgccctctctttcatctccattaagtattaatggttcaggtaagggattttcggtgaaatatggggattccaaagcctccttcgcactgaatcttttcttttgatcatagtctagtaaacctttgaccaatttcagacattctaagcttggaataatgtctttaaatttgttatcaaattggtattcatatttttccttaatatttgatataaccatgaaaaaccatggcatttcaaataagtttgggaaattggttaaattaggcgtccccataagtttgaatatgttagtaatggtttcaatctcatttgacccctggaaaatggcatacgtagtaaacaattccaataaaagacatccacacccccacatatccacttcggtagtatattgagtagtacctaataataattcaggcggtctataccacaatgttatcacacgattagtataaccttgtgatagttctgttttagaatctaaatttattttcctagctaacccaaaatcagttattttaacattccccatattatcaatcaagatgttagatcctttaatgtctctatgaatcacttgacatttatcatgtaaataaaaacatccttctagtagctgtttaaatatatgttttctttgtgaatcctttaatttaatattcttacttaataatatcccactcaaatcattatcagcgtaatcaaatatcatatatatcgttcttgaaccttcaatcataatttctctaatagatgatacattcggatgattaaatgattgtaataatttaatttctcgtatcgacgtgataggaaatccttctctttcattttgtagcctcagttttttcaatgcaacaagatgtctagttaatgtatttttagctttatataccttaccatatgtaccttcacccacttgtaaaatcctttcgtatactgaagtagatctctcctgagacgatattgtttgatatttgggataagaacaagtagtttcacgaactgtgccagataccttagaacttccactataacgagatttattgggaattgtccgtgctgttgatgatgtcactggagatgctgaagaattggatctttgagagagtatctgtctactacttcttggaccctttggcaaattaaaaattgtatttttgttctgttttcctgtatctttatcccttgaaatatccctatttgaaattgtattacttggagtggtattatcgaatcttgatttatatgtacctaaagaattgatatttatagtgttttttgatgtagacgatttcgtagaagcatttttagagtattcggttaaactagttctattagatccttcataacgagatactggcttagtttgataatgtcttttgggatagtctgttttacttgtttcatatctagatgttatcttactatttcccatataataagtatttgtatttcgtttcttattcgtatttgtaatattgttattattattatggaaggtcacagaatcttcatcattattggaagagatatcatcatcgccattgatgctgtcaggacgtattctttttttattcgaaaatgtaaatgaatcttttgattgtgacttagacaggagatttgtattttctaatgtagctggttcatgctggtatgctgatgggttatgtgtgtttctcctacctctatttaaattggtattgttggcattgcgatgcgatctcctaccacctctatatttagaacttgaaaaattattattatatggcatcgtccagctaatttgagaaattcaagaatggcctataaatatgacttaaggaatggtggaatcgttttttttgaagtcagattacttttcttattatttagcaaagtaatgagtctttttatgagatatacaaacactacactattaaaataaagttattgcatctaattttttatttgaactttttctctttttcttcttttgtctgtttcctttttctatttttgctttgctctatttaaaaaaaaattaaaaaaaaaaaaatacaagaatattttgtaaatttttacagtatgccctatgtgaaaaatagtagggtttagtcaaacttttgaaaatattaaataagccctaacttggtgtacaactttagttttgattaaaatcaatatttcattataccatgtatttttttgaattaagagcaatatatacttgtcatatatgtatacagcatgtatcatatctaatttaatgcaatattttttaagattgtacttcattttccttattttctttggttttcttctttttatttttttacttaaatcaatttcttggaattctgacctaacatagtatttattgtatgtgtttccatctctatttcactaccaattccagaagctgccccaatagtatcatctattacagattcttctacaaacattagatttgaatcacttgcattttttttattgttagcatttttagtactattgttttcattatcattgccgtgattgtgatcagatattctctgttttccaacatggtctggtgatgatatagaactattaatttcatcttgataggttctcatttttcttatttcagttacattgtcaacatctatatcatcttcattcctattttgggatggtgctcgctgtaatcttgagaatgtgtacgaatgacgacgtcttttgctatatggcaaatcatttatactagaaatgattgaattagattttaaactggttggagtcgcagaggatgcagttattgttgttaaaggtagtttattctttaggaacatatcttcattagaaccagatagaaattcaatgaatttaatcacctgattaaacaccaagacatcaacatcatctccccatattaaatccaaatgttcatgtttctctattttaatatcgaaaacaccatcagatggtaaatttcttttcatcacatcaatatcaattaataaatcagatgttccatataataataagattggaactttaatgtttgttcttgttgggaaatttgcaatttggtatggtcttgtcaaagaattgaacatatcatccgattcttcaaacatttggaatctctgtgatctcaggatttggaaccaatgaacaatacatttgacactagttgtggaataaagttttgcataacagatttccttttgttttggtttgatgtttaaagatttccaattgaacaatagcctgttacagatatcgataatgatactgaacagatgtggatgtgtagttctttgccaaacaacagcacttggtaagattatatttctaccaaagaataagtacattaaccgaggtgtagatttagcaaacgagtctgcgatcacgttatgtaatctctcaggggtcatggctggagcgattgcgattaaatggctgatctttgaatttaaatattcattgactgatagtgcagcaaacatctgtgcagaaccttgtgagaagccaatacaaaccaaattatccacctgtgtataatcgagtatgaattcaattgaatttggaatgtcaaagaacgcaaactcatctatagaaaaatcccaaaatttggcagattttggtggatgatataagtgtgcagtggaatatttattacctctattattccccatccacacatcatagcctaaatcatgtaaaagaaaaggtaaatttttatgcctttccacttgacaacaccaaacgtctgaacacattaatagaccgtgatgtaagtagaccactttgccattattattattcttcttaggagctattctatggatagtcaagacataattatcttcggttctcaccaaatgatcttccacggtgatatcgaataatgcacacatttcatggatcgtgggagcggatcttaatttttcttctattgtggtatcatcgatattggcggtgaaattgataattgatgtgaacagattgagtatgttacttgggataagttttaggaaaaaggatattattgattcaagatacaccaaaagtacaatgaaaagatcagtgaaagatattctattaaacattttataatattcattatcgtagactggtggataggattttctcatagttggaaaacgaaaaaaaaaataaaatgtggatgaaagaggaagggggggtggggagaaaagctaatgagtactttatgttttatatttgcttcttcttcttcttcttctttgttttgttttgttttgttttgtgatgtctacaacaataatagcactatatatactaacattaactagataatgttgtatatgagaatatataattgtgtacgtatgcttttatccctttatgtatttatataaaggtttaaactgttcacaattgaaatatgctagcaattaaacgaaaacaatacgtaaataatagaaccaccacttgtattttttattttacctcttttttttatttttttatttttttttaaacgaagcaattagggttagattgttgggaatacaaagaaaacagaaagaatagtagggttgtggaatagagtttatacagtagagtttgtttgcaatagaacgaataaataacataataaaaggaatatatagatatatacataaataaatgaatagatagatagatagataagcagaagcaaaaaaaataaaaatgagaaagagagggcaataaagggagaaacatagaaatagaaaatatatttaaattaataaaacatttatatttataatttttgttttttttattattattatttttttttcctttgtaaaatcatagagttaataaataagaacctgctgcaaaagtgaatccgatcaaagcatacccagttctataaacaccttttaaagtcaattcactagcagtatcccaaatcaaatgtctaatagcaccaccgtattgtaaagcgaataaataggcgaaaccagctttaatagtcaggccgacccatttattcattcttgagactttatcatgataccagttaaccactttttgggtagtgatatctaagcctactaaactacctagaccgaatagcatggtgataccataaaaggcgaagccaaggaagattaaagacaatctatgtaaggaagacaggtaccatgtcaattgtggttgatagatggtcagatgcggggagatgggtctttgttttctttgttttattaattcgggggtttcaataccgtttttatccattaaattggtagtgtcgatgtagggaactttatcatttttgattgaagaagtagagaaatgagagattagggaagtggatctagatgctactaaaaatgttttagtacataaatgatttgcttggtctgtgatcaaagtagaataaaatttaggtaaacctgcctttaacatgattgaactgttgtagagaaaatatgtgcctgctgttcttgggtctttattttatcacttatgtagttacctatttacttatttatttagttatttatttatttacctatgcacttgaatcttgagagaggtaaaagagaagagagtaacaaagaaagtatgcaaaaggatatttcttatttatctttttattttttttctcttttactattcattattattagtagtagtattagtattatgattatgactatatatttctgttttgtatttaaagtattacaaaaaacagtagggaaaaaaagaaaaaaagtaaaaacggaaaacggaaaaaggaaaaagaaaaacgagagaaagagagagagaaatagaaagtgttaataggacacttacgtttacatctttgaaaaagaggataagtaggagtatatgttcccaatcaatgaacatataaaacaaatggatataaaacaagtaaacagggaaattgggaagcatttccccattctattgatatataagatagtatttaaggagagaaatggattaatttaattttacacatacatatacatatacatatacatacacacacacacacacacacacacacacacacacacacacacacacacacacacacacacacacgctttctctctcttttttttcctccatttttttctccatctctccttgtgcttgcttcttaatcattcatcccattgaagaatcgaatcaaatcaaatctgaccaaatctgatgtattggcataaaccgtatggtcttcgaagatttgttcccgtacattgagacggaaaaaaaaaaaaaaaaaaaaggaatatgtttgtacagctctgttataattttgtaacacggcattaatttaattatatacacacacacacatacaaacgaacataggtaatgataatgtcttatgtgattggttgctgttgcaatttttcttgtttcccctttttctcttttttttccaagtgtttcattttttccaacaaacctaaaaccggaagagcggcaccaactcttgtctcgaaaaaaaaaaaggggggggaagaggaggagggaagtaagcgtgtgtaaataaatgccagcaacaccaaaaaataatatttggtggttttggttcctgtgtgtgtgaagaattagagatatcgtttggctctccatagacttcttctcattcactcgcacttcattacaattgctggtaagcagcaatgtcttgtgttgtttgtttggaccaccctggtagcgacggattcatacctgccttgtttacagtaacagtaaataatgaaaagttgtatgatcgtttattcactcttctagatataccatgtatatatttatctgtatacaacatatgtttattagtagagagatacaactagctaagtggcacacattttcacattacgttgctttaaaatgaattatcatatcgattcatgattcataccattaattttgtacatgtatatatatatggtatgtatatatacattaaccacatgaatgctaaaagtattttccacggactgagaaatggtgaaaaaataatgaaagaaggagagaagttgcactagttaaaattgaattgaatagtttccacagtttctgcagtttccgtcgtctttgctcccggttttatgtaattctgactcttagccgggtaaggtttggtttctttctttttttccgtcttccttttgatttttattttgtaatgtgaatatcgctattttttttttttttttaacttatctagtggctattattagtacagcatatatctatacatgaattggaaaatggaaaaatggaaggtagtagctgggttgaattatttttgttggtttatttatattgttctcgaacaataagaactacacagcaatatttgtataaataagttttttgtcgttgtcgtcgctgataattttatctattaaatcatataattggtttacacttttttcgttttaaatatatatatatagatagatagatagatagttttgttattaaccgtgatagaacatgtggtcgtatttatttggtggatcttcaaaatcttatagtaataataataactctaaaagtagagagttgactaagaaagctatcatagaattaagagaacatataaatttattggacaagaaacagtcccatcttcaaacgcagatattaaattcagagaacgatgctaagaaatatttaaataagggtaatcggacattagccaagaactgtttaaaaaggaagaagatatatgagcaacaattggaaaaattggatggtcaaatcaactctttggagcaacaactgttcaccatcgagacctctaatctgaatgcggaaactatgagagctatgcaacagggtgctaaggcaatgaaatcgatacataagaatatggatatcgatcaagtggatgaaactatggatgaagttagagaacaagttcaactaagtgaggagattagtgacgctatctctaaacccttgtacactgcaggctctttagctaatgaagtagacgaagatgagttggatcaagaattggaattgttacaggaagaaaatgtccatgctgatatgttgaagactgctgctgttactaataataatgaccacatatcgtcacttcgcgctaattctgctaaacttgaacaaaacatttctttgccatcagtacccaatagtaatattcaatccactaataaaataattaaagaaaatggaatgaatcaaagtgagaatgaaagcgaagatgaagatgaacgggcattaagagaattacaagctgaaatgggtttatagtatatatatgtacgtatcgatatgcatatatgtgtatatatatataggggaaagaaaaaaaaagacaaaaaaaaaattaataggaaagatttgagtatttgaacgttgctgatgttgtattacattactactgtcacttattttatttctttatttatttgcttttattttttttcttgttgatttttgttgtctataatactatttatattttagtaatacaatcaaaaagtcaattccaattccaattccaattccacattattttgatctatctacatacggctaaagttttctttttttaaactatatattattttctttattattattgttgttgttgttgttgttgttattcaattgacaagtacccatattaagaaaaaaacaaatataataaagaaaatcttggcagctagccatctattacttttaactctatcaaaatattttaataattccctttgagcacctgtgatgttcatatcaatatcttccacatttgcatcgattctttggattgtttcaccttgttcttgtaccatggaagctaattgttgaaacaaattcccgacttcctgaattgtagattctattgtctctacagcacggcttctctcttgtaaatacatgttttcatttatcataccttcctccattaacatcagctgttgatcactagtgggtacagctaatccactgataccagactgttgatttccatagtcactagttgcattattaccatcagttatgttatctgtctcgtcaagtaatgacgacatgaacggattactactattgtacccaacctcgcctatattggtggaaatactgctgccattattactgttattatcgttatattcattacttactccagtgacgttattgttattactgttggaagtctcatcattaattttcccccatctgtctctattacttaactccaatttttgtctctcttccaaaacattcttaaaatctcctgaaatattcttcatttttgtgtttaatagattaaccacattatgagagtgtttcgatgtaagtttctccctattattataactgtatttattattgatacccctaccattattattgttattattacttattttagcaagttcaaccaaatcttgttcaatagaatatatttttctcttaattaaaaaagataattcagcaatctccactggattatcattaaacataggttttcttttcgctaagatagccaatttagataataattgtgcagttcgtgatatctctttggctataccggaggctttcttttggaagtcagatacaggacgacttttttcattgttatcattgttaccagattcgtttctattcgaagcagactgtttattatacaattttttatatgtaattatacatctttgaaactctgatgttctgtctctaatattcatttgttgcagatttcaacttatttttgtataattgtatgctgtatatctacaaattaaattatgtgtttggatattcaataatgatattagttacagccatataagtaaacaataatcaataaatgctggcaaagtgtgtcagtatgtgtaagaggatgtggatacaatcattttctgcttcttctttttttttttttggtcgatctttcttactttctttttgcaatttttcgacattaaactacttttttctttcttgttttgtcattccgggttgtgacggatttgatttccgtctggtgacttggtttatttccggcactttagatgtttaaggtaaatggcataataaataataatgataaagagacgatatctggtactctatttgcaatagatatagtgatatatgggttgcactggtgagttggaaaagatagatattaattaaactaaatatggttgtgtattgataataaatttatgtacaacaaataatttatgtgtatatagatccatgcagtactttaatgtgtaaacatctgttgtcatttcttgactacgctgcgacattatacataattcatcaatcaatcaattagatacagaaaaaataaaaaataaaaaaaacaaagttcagcctatacatacataaatccattattgtttcttataatttaggattattagtagcgaaatgacgaacaacttcatcaatagctttggccacatgaagaacgttaccttcattcaaaccagcaatagaagctcttccagaactaaccatatagatagcatggtattgttccaatctctgaaccatctctggagttaaagcggtgaaagagaacataccacactgattaacaatgtggtcccaattaccgggagtacccaactccactagatggtctcttagtttgtgtctcatttcactgattctagaagacatagtaatcatgtctgtatgccattgtttagtcaattcaggatcatttaagatggtagccacgatcttggacccgtatgctggcggattggacacttcagatctgacaatcttggccaattgggaattcaaagcagttttaactttcttgttgatctcactagattggtttggaataactaggtggaaacaaccaacacgttcaccatacatacccacgtttttagcgaaggattggcaaacaactactggagccacgttttgtaatttggctaatcctaatctgacagcaaaggcgtctctatccaagtcaccagtagcgaacccttgatatgcagagtcgaataatacaatatgattctttttagagatggtgtctaggatttggctccattgttctttatttggatccaacccggttggattgtgggcacatgcatgtagaaggaagattgaaccctctggtgcagtctctatggtttgaatgaactcatttaattgtaaagatttggtggctgcatcccaataagggtattcagcagtctttaaattttgaccttcgaagatggccttatggtttggccaagttgggttagataagtaaacggtcttattaggtaagaatttttcgataaatttggcggcgatatgcaaagcaccagtaccagagatagactggatagagatagttctttcttgatcataatcttcgccaaagatgatacgggcagcaccacttgtgaaggctggtaacccagtaataggtaagtattcatgattatagtttggatccttctttagcttttcttcagcagattgaacacttggtaagacccatggtttacctgaattatcacggtatgcgccaatacccaaatcgactttcagtggccgagtatcttgagataatcttttcttaatatcaaaaagagcatcaggaggtagttgtgggacgtcgttaaaaatagttatttgggacatattgaaccttgtcaaacctgtttcagagagatgaatatgagattgtttctttgcgtgtatagtctgtactaatatacaactgactacttatatgttataatgacaagtggttaaatttgagaaactacgcattaaagtacaaaaaaaagaaagaaagaagaatacgaaaaaatcgattagagtaaaatacatatgcactacaagagacgcaaagaaggcgtaatttattttaaaaacgatctgtaataaagtaaagacgtatatatgggtacattgtacgtgtaggagtgtgtctactattggagacacctttgtaaatctgacggagacaatagatggtaattcaagagtatataacgttataaataatctctaactcatttgaaaaaagaaaataaaaaaaaaagaaaaagaagggagaagaaataagaagagaaggaaagagaagagtcgaattagagaaattttttttcgcgatattataaaaccctctgaaggggaaggggtgggtggaagatgactctgttttactcgacgacgccataatggctgccgaatgattcatttgttaaattagccattccaacaaaacgacatgaaccccttcttaagacaaaaaaaataaaaataaaaataaaaaacaccagaccaacaagcaaattaaatagcaaaacccatttttatgtttgcaagactctttcaaggttcaaatattattttgaacgaatgatggtgtggttttatttagggtttggtttagccctagggttgtctagtttagtttgatcataaaaaaaatcacaattaatataacggaaacaattacttaaccgtgtcatgtgttaacaacaactggacaactggtattaatatatcacactttaagatatcttttttgttccataatgaattattctattgatcttttctgtatttctcttcctttttttccatatttctggtggaccagagaataaagaaaagaaagtgacaaagcactgatgttccttcatatacatatagacaaatggatttacaaattatgatagattacaaaggtttaattaatttgaatgactggattaaaggattctttatattgaataaattctggttgatttggttcatctactattttgtacataatatcataaaaattttggctggtgttagatcaactattcaaaatagaaaaatttcaaagctttggattatttctattcatctgttacctataataattatactatactggttatatcaattattttttactattaatgattatactaatactctaactggtctttttatatccatactattctctaatttaattgaattattctatactgtgacgacaaatatgtcatattttaataatgacaatgttaatattgtcctagaaataattccaattttttattctttacattattacaatagttgcacttctaagttaatgccatttgggttggatttgttttatgttttatttaatagattattaattcattttttagaattatttgataaaagaaactggcatctagctattgattcatctataaatatattcattcttttcatctttttttatgataacgactgttttgcctcacaattgacaaaaatccgtctcttccctaaaatagcacccgtactgtattgcattgtatcacaactattatattttttccatttatcaaacaatgataagggtaatgatatctggtccctatttattaaccaatatcaaagttatgaagataaaagtttccaagaatttgttatgagtttagctacttctcatgcaacaaatggttcaatcaacccatgtagctgtgatatatatggcaaccgggtgtgtggtgtcgttgataccggttcttatatgatcagtggatatttgaaccaatataaagtatcgcctctatggaagaaatataatacagatgagaacacaaatgagaatggtaatagaaacacaggtctatcatcccattatagtttggaaaatgcatatctttcattgatcatattggtgcaatggacactttttaatattgcccagagattgaaacaatttagactacgtttattattgtctaatttaacatcattaattctatctatttgtaaaaaaaatagtaataataagagaaatactaagtctatatcaaataaaagtgagcctaagaatgggaataaaaagatcaaagatttaaataaattagtaacagccaaaaattatagtaaatttttcttgcgaactaaaaatgataatagtaatgataatcgcagttcgaatccacaagattcattgtttttactacctgattttgattcatccgaagattattcaccagataactcatatagtaacactgataaaaatgatgaattgtatgatacagaaagttgggcactatcgcaagaagtcgatagcgaggaagcactaacattgcatgatgaattatggcagctattgttatcgtttaaagataattctaatcctcaatattgttataagaacactaatgaggaattactgtggcagatatccatgtggtctctactaagacatcaactgatagaaaataaaagattgactagatctatgtatgctaaagaatcgagtaaagagttaatttctgaaatcgtctcagaacaaagaattcagttagatgatattatattaaatgattttgaagaaataggtatgataaatgagacaagtgaaatggacgagatagatgatccactggtttgtccaatttgttgtttgaatccaagaaacgttatactttggccctgccaatgtctaactgtatgtgatgaatgtcgattaaaactagggcatagagcaatcaagagttgcatgtcctgtgataaacatgtgcaaggctatacaagggtaaactttgtttaaacttatagatttatatacataccactgacactcacctttttttatgagagaaatttacttcttcgccttcctgtgaagatatctttttaacaattcccagtataataatccttgtttagtaactgcactgtatgtacatatatttgtaactgttatgattatagtatcttatttttttttttagaccacaacctgaaactttttatgacaagatgagggtaatcaatattaattttcttttttttttttcggtttgtttctctttttctctgcttagccaaagggaaaaaattttccaaaaaaaaaaaaaaaagccaatgatatataaactgcagtgaagttatttagtgaatcgacatttgagtttttctgtccttcattcctgtcgtttcttacttaatgaaacaagtttctctccttttgctcgaaaaagtaaagtaactataggcttgtgttaagttgaacgtacaagggaggagaattctatggctttctaggaattcgtttctagaacctgtagtcaattcttggctaatgttgcttaactttcttaaatttgttctcttaacaattcaacgctcgagaggcagagtctcaagggataatttgatccgtgtattaaatcttaacttctcctcggtcgtcaaacgtcgggttttgagtcgttttgtgtttaatctatcaataagtttatatttattgaaatcagataatcgttgccatgaagtatatggatgagacagaagtagccccgttgacaagtcatgtcctaaaaatttagatcaagtggaatgcatgatttagaattctctttgtttcgttttacttttctctttatctattgggaaccctcttttttttgaaggttcgcagtttttggaaagagggaatatgtggaatattgatcgagttcaatcatctttgttgtcgttctaccgcagtatattcctaaacattatgaggtgatcctagtggtcgattatcatttgtgtataaccatactgctgacatgttagtttttttataggtattcttgctgatatatgtatatatgctacgttataggaccgaatttatttctgcaaatgtgtagttatagggatgtgtatagatttgccattgttttttcttgttcttgatgtatgattttggtaaaagggataaaattgtgatgagtgctatgtttttttcagcaacttaatgttatggttttagtaccatgctatcctttattaaattaatgattatatacttgtatgtgtatgtatatgttattgactttggaattatagtaaaaccgatgtaccttttatggatgtgtctatgacaaataatagtagtaataataataacgtaattttaatggtggaataaacgtattgggttttccacatacactaatcctaaggaatcagcagcattgataacagctctatccttaactgagccagttggcgctgcaatatatttaacaccagatttaactgccctataaacattatcggggaatgggaaaaatgcatctgatgataatgatacattattcaatttagataaccattccttacgttcttcttcagttaatggttttggtacttctttaaaattggcttcatattctgatttttctgggtcgtcaatagggatttgattagtgacgaacaaatcaatggcatttgatttagatggtcttttaataccttttgcccatttgattcctaagacacgtggatgttgtcgtaaccaccaattatcagctttgtctcccgccagtctagtacaatggattctagattgttgaccagcacctagcccaataaccataccattcttagcataacagatagaatttgactgtgtatattttaaagctaatgtagctacagttaaatcaatgatagcctgatcagttaggtttttattttgtgatataatttccctaaaagttgattggtttataatagcatcatttcgtctctgctgtaaatagacaccatagacttgtcttgtttctaaagtgtttggaacatagtttgggtcgatttgtaagatacaatattttcctttcttcttttttttaagtatttctaaagcctctggctcaaatcctggtgcgacaacaccatcagaaacttcataagagatcatttttgctgttggaatgtccacaatatttgataaagcaataaaatcaccaaatgacgacattctatcagcaccccttgctctagcatatgctgcagccaaaggtgatatatcatcaatatcagtgacaaaatagacttgtttttctacttctgttaatgggaagcccacagcaacaccagcaggcgaaacatgtttaaaggaagctgcagcaggtaaattcaatgaagctgataactccttaactaaagaccaggaatttaaagcgtctagtaagttaatataacctggagaaccattcaacactttaaatggtaattgctcatgttcactgacaaaagcttgtgctggtttctgatgaggatttataccataacgtaaaggtagttgcgctttatcttctgcaaactgttttctaaagaaatctgcaatacaggcatcgtattctgctgtgtgttcgaaggcctttaaagccaatctatttcttaaatcggcagaaatttctccactttttgaattagataattcttcaataaatgcagcataatcctttggatcagataaaactgtgactctagaatgattctttgcggcagctcttaacaaagtgacaccacctatgtctatttcttcgacagcttcattcatagtaacaccaatctttgacacagtttccttaaatgggtaaagattacaaactacaaaatccagtttatcaatatgttgttgttttaaatcatcttcgtcactttctaaatttctagctagaatcccaccatggattgcaggatgtaaagttttgactttaccatctagcatttcaggtgagtgtgttatactagacacattagatacagggaacccagagtctctaattaattgtgcagtccccccagaagctaggattttaacattattatcaactaaaccttttgctaaatctaatagtcctgttttgtcatatactgatataattgctgttttttctccagacattatcgcaaatagatgtatatatgtatgatgtcttaaaagaaagtaaaaaaaaaaggagttagtggattaataaacgaatttggaagattaattgaaagcaaactgtcagttcggttgtgtaaaaagtgatgtttctaaacagcaaagataatttgctaaataccctttgagtagttatccataaaaatgtttgtatatacgtattatatatgtttgtcttttaaattttcagttttttatgaactttttggcttccctccctttattagaattaaaatgacacaaaatacagaaactattataaaaaaaaagaaaagaaaaatgaaaagaaaagtaaaaaaagagaagagacacaaacatagaactttgagcaagagaggcctgtaccagattagtctaaaacttttaccctacttatttctcaaaatcatcaacagcacatctaccttccttcgaaatgtaaaaatatttggcaaagaatgattaacctagaatataaaaactatatcataatgttgtctatatgtaaattgtacatacatatacgtataaatatacatataatacaaagttagatacacttaatatagaaataaatggaaaaaggggggaaaggaaataagaaactactaaagctggaaacaaaaaaaatggatttttcttttgattcaaccagcttattttctgtatctccataaggataaggtgttttgtctcttccaggtctttcttctaccggcttgagtgttgtgatacttgtgacccttgttgatacctctagatttcttaccagtagctgttaagcctctgttttcacggtgcttgtggactgggttacagatccagttgtatcttgggtctcttctgatagctttgtgttgtgggtcaactaagataacttcgtagtatttgtaagtagaatcttggttgatccagtaagagttcaagactcttaagttggcagcacgacgaccaactctttcttcagcagtagctcttaaagatctttggtacttcaattcgttaacaccttggttagttggcttaccgtaggtggcaccctttggaacaggtctctttctgttacctcttctgactctgactctgtagataacgaaaccttgcttagccttgtaacctaatcttctagccttatctggtctagatggtctagaagctctgtggatgacattcttttgtctgtattcccagactctgactctttgtaagaatcttaggacatcagattgcttctttctgtgtaattcttctaaatacttgtaagcacccattgctgatcgataatagttggttgtggagtcttcacttattgagaacaaaagtctgttaattggcgaatggaaatcgtttggggaaatagcagacgactcttgatactcaagtatgaaaactcgttttcgtctaaactttcttattttaatatttaagtacttcaaataaaaaaaaaattgaacaggagaatgacccaaaaaaaaaaaaaaaaaaaaattttttctgcgtgggtcatcgttcaagactgaaagattcgccctggttactatgttcagcagacccaaagattcgggtcccagctataagtgatattttagggtttgaaacatccgcggtgtctgggttcttgagctaggatgccaatttttgaatgccaaagaaaatggaattgtgattattttcgatgttagggttgacgccagaagcatcgcatcttccttagggttgtgtataaatgaattggtcttttttttttattacaagatctctctgttgcaagtttgagtgcaggaaagagagggcaggtggttgttttaacggaagaaatggcgtggatagtgcttgcgtggatttggatctcttatgaataatacataattccaaagctagttttattagagtttctttctaatcaccaaatacaaattatcatctgcctctctctccctctctctccctctctttccctctctctttttttttttttctcttttcccctctttatgcagaatttgagacgcgacttttaaaagactgagttttgcgtttcattaataagaaaatagatcaaatgtggaaatatttgatagatggcatggtatagacagaggttgaatactagaactgctatgtaaagatattcagattttcaaatgatacgtgtctgctgttttgttctctattctctatacacataaatatatatatgcatatatattgtacagacgttagttaatagtaaaatgagtacaaagagacgattttttaaagatgaactagaatcctctttagaaacaacaacatcatttaatacatcttttgataattctaaatctttcctattcaatccagtacaagaacaaacagaattgaacaatgtcaaagcttctcagaaattaacaacagaccccaaattgagtctcgacgaacataacatacaaaatgatgctgatgacgataatgatgataatgaaattgaaataatcgaagagaaacaattatctccaatagaaatatttactcattctattctagaagttattccaaatattaaagtaagtataatatctgagttatttgatatatttaaagatagcggtaatgatgatttattacaaaaagcactttcatattattttgaacattatcaaacatctagtcccaataaaagtaaaatattgcataatataccctcaagtcccttgcaggtatcctcatttaaaagaaagcagcttgtgcttcaagaaactaacaaaagattaaaaatttctttttcttggaaaagatttattggttccttacaagtgactgcaatggccacacgacctaccacgaaacaactgaaatatggaaccgtcttaaaattggttaaacaaaattcaggaatcaccacatcgaaactgtatgataataaaggaagacaaaaaaagatgatgtcaagttatgtcaaaatttatgatcctcaattgaatcgtgaaatcggtaaagttccagaagacgttgcaagaatattatatccgttgttagaaactaacgaagtcatatttgaagcgattttagtattctgtgacagtaaaagattaagtattggtgataactttgtttttgaacttgattgttacttgacatctaacttatttgaaaatgaaagtgagttcacccacacacaaagttcccagaatataactacaagctgtgataatgatgatttaacctataattttaattttcacagcaacaactatagaaaattattgaaccaaaattttaaatccagtactcctgataaagaagaacatgttgaaagtaaatctagaagaatagcattgattacattattcaaaaaattaagattaaatccattaactaaccatgaagaagaactgatcaaatcacgagataataataatactgttaaagacggtaaaagcgacgatgaaattattgatttagaagatgagatgagttttgaagagtttacatcacaaacatatgagaatcaggaagctaacccttcgggatatgagtctgaagaaacaatgagtttgaaccaattgcaacggttctataattcagcacaatcatatgagcttttaaaaaatttacctgaaacagaaccaccttcaggtttgcttaaattggcattaaggccatatcaaaagcaaggtttaacgtggatgttacgaagggagcaagaatataataaagcagccgctttggatgacttggaggtagataataatatgatgaatccattgtggaagcaatttaaatggccaaaggatagatcatgggcagttaatagaatgaaagaaaaatcaaatgataatcctaattcagaactgtttttctatgcgaatctgcatactggtgacttttccttggaaaagcccatattaaaaacaatgataaaaggtggcatcttatctgatgaaatgggtctaggtaaaacaatatctgcattatcgttagtactgatgtgtcctcatgattcaaagatggaggaaaatgagttattcattgcagacattaataacagagagagcgctgatgttaataaagtcgaactaaaaaaaccatacgcttcaaaaactacattgattgtggttccaatgtcattgcttaatcaatggcattcagagtttgagtccatcaataataatcctaatttaagagcagatatatattatggcggaaatgttagtagcctgaaaaagttactaacaaagacaaataatccaccaaccgtgatacttacaacatatggaatagttcaaaatgaatggagcaaattatttagagaaaatagaaacaccaatgaagccattttgtcatcgaatgggctgttttctttagagttttatagaataatcattgatgaaggtcatacaattagaaacaggagcacgataacatcaaaggcagtcatggatctttctagtaaatgtaaatgggttttaacaggtacacctattattaatcgtttagatgatttatttagtatggtgaaatttttgaagttggaaccgtggtgtaatgtaaattattggaagacctttgtctcaaacccctttgaagagaaagaattcaagcaagcctttgatgttgtcaattcaattatggagccagtgttattacgaagaactaaacaaatgaaagatgctaatggagaattattagttaaactgccaccaaaggagattatcattaaaaaattaaaattgaataaaacccaaaagactgtatataattattttttggatattgcagaaaattctgttaaaacagggttagctcgtggcgacttattgaaaaaatattctacaattttggttcatattttaaggttaaggcaaatatgttgtgatgttgagttattaggtacattggatgataatgacgatgatatttcgaaaaatacacaactattaacacctaataatgaaataaaacgttttctgcataacactcaaaagaatgtagaaaatgaatcagagaaagcaaataaaggattgatagttgccaagttgaaagagagatattcaaatattaagtcattagtagaaaaagaatgttccatatgtacaaatgaagatgttgatgtatcaaaaatattgttaactgaatgtggacatccattttgtgaaaattgtcttttagaatatatcaattatcaacaagagaagaagaatgaattaagatgtccaatatgtcgttttagtatatcacagaagtcaatgtttaagcccagttataatgaacattctgatactttagatttcatatcttatgataccgaaaataaaccagccaaactagccgcacttattgagaatttacaacagttacaagattcatcatctggggaacaagtgattgttttttcccaattttcttcttaccttgatattttagaaagacaattgaaagaagtgtttccaatcgataaagccaaaatttataaatttgatggaagattgtctttaaaagagagaaacgacatattgaaggaatttcgagaaaaagatcttagtaggcaaaagatacttctattatccttaaaagccgggggagttggattaaatttaacatgtgcatcatatgcatttatgatggatccctggtggtcacctagtatggaggatcaggctattgatagaattcatcgtatagggcaaataaataatgtaaaagtcttgagatttatcattgaagatagcattgaagaaaaaatgcttcgaattcaggatcaaaaaagaagtattggagaggttatagacacagatcaagaagaaagaagaaagagaagaattgaagaaattaaaagtttgtttgagtaattgtttcagagagtttctactttctttatacaaaatatttattttataaagtgttatttcgtgattgatagagtgacttatatagttgtagatgaatatatataacaaattgctacacgtaaaaatgagcaatataaaagaattaaaaattctcagcaagggatttggtagatttttaattttaatatatatttatactgctaaaagagtttttttggatatatatgtaattcaaatataatattcctgttatatatataattgtacggagcataattttatataaataacatagttagcttggtttgtcaaatatattcatttacattagtagttttataataatgattttttatattgagaaatgttatcgtataactactttatgtattctatatcgagcttattaaaactaattaaaatctgagaagaattgtgatttagaattatagaaatacattatcaaactatcttatataaatttttcaagtaattgtgtctgcaaaataaaaaacaataatattgtttatgcaaaacttttggttttcatggcattgagccattatcacgaggtaaatgtaaacaagtttacctgaagagactccttttagagcaaaacataaaaaacaatcatatacatattttgaataattttacagtaatacattcaagctcatataataattataaatagctataaataatttttaaacagtctctttctattatatcaacttctaacatatcttgttttctttcttcattattatcaaaaaattttataaataaagaaaacttttactttttctatcttatcataaagaggatgtgaaacaaataacatatctactaataacaaaaagagatagtcaatatgctttgccaacctcttgaagttaaattagttaatatatttttgttgaaatagaatgttctataataaaatagatagaacaataagattttagcagacactaaacgataaattgttgagtgataattgttgagaggtcaccaaaagttgttgagtttatttattaaatatcttactgttcgtagaggaaaatggcttaatattaacatatataaagccaaggatttcatcatacattatttttatcttatttacaatctttatatattattatttctatgttgtatatagagaaagaaagtgaagaactttatcataattttgtatactaaatctgtttaatataatattgagaatgtttactatatatccaatgaataaaggcgctcattctcaacaattttagcacttaataccaacgtaccgtaacttaaatcatatttaaaaaaacaaataaatcttaaaaagattcatgtaactacaaatcaatataagaaattatctctggatgggtgattttaactattaatatctatcgctactattaagtaggttcacctaatactaattatatcttctctcatccacactcacaactcgttcttcttttccttctactttttttatttctgttctatctatagctcctcgaagaaaatttttttttatttttttaatcttcaatttatttaaaaacttctttagaaaaatttctaaagtcatcgcaaaaaatttactaaaagaatccttttactatgtgatggttaatgcaaagaataaccatattatgacctgtttgtttagttactactaagcttccgacagtcaccgttaccacaaaggtataattgttatttattaaatatatcttcaaataattttttttaaaaatacaaatattaataatcaaataaatacctacagccaattcttatcatgggaacttacaggaaaagattcaatgaaaaggcaagggctggtcaaatggccaaacttagagaattaaaaagaataaggaataaacaattttttagacatgaatttactaacgatagtgataatgatgataatgattcaatgaagaaatccgaagatacaattagtaacgaagatactaatgctgaattattgaaacctttaactgaagaagagagatctctgaagaaaagaaaattacaagaattgttcactccaaaggaatctaaaatatctcgacagaagaagaaaagattagataagtttattgaacatcaactgaaaagggaagagagaaaggcaattattgaaaaattacaaggttataaaattgatacttctaaattgacaagttctaaaaaattaggtcatgggagacaaaccaggaaagaagaatttgccgaagctttagaactagagagacaaggtaggggtacagctaaaaccaaagatattctatatgaggaacatgagtttaaagaatggaatgatgataaaaatgataatagtataaacaaagaagaagaggaagaaaaaagtgactttgagtccaagtttggtgatataccaactgaggctgcttcctcctttattgataacagaccttctaaatttggtggacaaggcttcggttttggttttgccaatattgaggtagtcaaaaaagagaaaaaagcttccaagaggaaatataattggagacaacgaattgaacttcaagaaaaaaagaatcaaatgttagaagatgaattagattttaagtcaagctttgaagaagatgatgatgaggaagaagatgaaaatagtacagaggaagaaaattcaaaagagaaatccaatgataatactgtgagtagtaatgaagaagagttggaagaagaagtaaatgaagaatctgaaggatctgaagaagaattatcctctgaagaaagtgaggctaagaagagagctgaggaattcaaagagtgggccaatcaagagattaaaaaaattgaaggaagagatggaaatttagaaactccaactttaaacatcgaatataaacctattattagagaagaagatttagatgatggcctagaaactaatactattcctgtaaacttaaactctaaaagaaaagccttttttgttaaagtgaagagacctgaagaaatccaacaaaccagaatgcaattacctgtatttgctgaagaacattcaattatggaggcgatccatcataatgatgttgttattatttgtggtgaaacaggttctggtaagaccactcaagttcctcaatttttgtatgaatctgggttcggtagtaaagattctgatgattatccaggtatgattggtatcacacaaccaagaagagttgctgctgtttctatggctaatcgtgttagtaatgaattgggtgatcatggtaataaagtagcttatcaaattcgttttgattccaccactaaggatgatacaagagtgaagttcatgactgatggtgttttattaagagaaatgatgcatgatttcaaacttaccaagtactcttctatcatcattgatgaagcgcatgagagaaatattaatacagacatcctgatcggtatgttaagtcgttgtgtcagattacgtgctaaagaacatgacgtagatcctatgaactgcaaaaaattaaagttgattatcatgtcagctacacttagagtttctgattttagtgaaaattctactttattccccattccgccacctatattaaatatttctgctagacaattcccagtttcaatccattttaatcgtaagactgcatttaactacgtcgaggaagcattcaagaagacttgtaaaatccatagacgattaccaccaggtgctattttagttttcctaactggtcaacaggagataacacaaatggtaaaaagattaagaaaagaatttcctttccctaagaaacacaagcaccataaaaatgatgacaatatagctaccgtatgggttaattccaaaaacacggatcttgaagttgaagatattaattttagtgttaaagctgttgatgaagaacaatttaatgctgaaatccaagaagaaagtgatatagatgatactagtgaagatgaagaaggatttgaggaggtattaactgaagaacaaactccaaatgacccattgtatgttttaccattatactcattattacccactaaagaacagatgagagtgtttgaagacccacctcctggatctagattatgtgttgtggccactaacgttgcagaaacatcactaactattcctaatgtcaggtacgtagttgactgtggtagatctaaagagcgtgtttacaatgaagaaaatggcgttcaaagtttcgaaataggttggatcagcaaagccagtgcagatcaaagaagtggtagagctggtcgtactggtccaggccattgttataggttatattcttctgctgtatttgaacgtgatttcgagcaattctcacgccctgaaattttacgaatgccggttgaaagtattgtacttcaaatgaaaagtatggctattcataatattataaatttcccatttcctactccaccagataggacaatgttggctaatgcattacagttattaaaatatctaggtgccttagatatgaaggaacgtattacagaagacggtaaaaaaatgagtctattcccattatcacctaggttttctaagatggtactagtttctacagaacaaaattgcctgccttatgttgtttcaattgtgagtgcattatctgttggtgatccatttatcagtgaattcgaattgggtatcaatgaaaagatcagaaatagtgaatccagagaaggcaatgattctgaggatgaaacagaaaataattctataaaagaggaaaaaaagcgtgaattaaggataaaattttataaaagtagaaataggttcagtaaattagatccttatagtgatgcttttcgtttattaagtgtagtgagtgcgattgattatattccaaaattagcaagagaaaaatttatagaagataatttcctaagaggtaaattgatggaagaaatcatgaagttaagaaaacaattgacttatatcattaagtcaaatacaccaaaagagaacattgctatcacagtgaaagatgaggacctaaaatctgatatccccaatgaaacacaattaaaattattaaaacaaatgatatgtgctggatttgttgaccgtgttgcaattcgtgccgattgtatttaccctgaagatgcaaaaatcacaaacaaaaccagtctggtcaatattccatatatcccagtgatggcgcaaaagagccctatcattgaagaatcctttgtttatattcatccaacatccattctttctaacttaggggaattgcctccaaaatatctaattttccattctttgcaccttggtaataataataaaacaagaataaatgctttatgtgatataaagagcacaccgctcgcaaatatagcaaggaagggccaactattgtcttacagtaagccgttgactggtcaaggattaaagacaataaacctatcaataaatgaacgtgtatgttacgtagtccccagattcggtagttctgcggacagtgatcttaagattggttgggatttaaatccaatagcagttcaccaaaagaaagaaaatggtcgatggattgttgataaattcttaaccaataaaaattataaatcaattggacaagcacaaaaatcttagaagaaaaaagggattctgatatatttttaattaccgttatattatatatatttaaaaactgtatagtgtattatttttaataatttataagagatatatatggtttctgaaagccactatcacttttgatagatatatctagaattctacgttgatttttgctcactcttctctttattaataaaaattattatgattatttcttttgacggagcttttactactaatctacatacttttcttacttatggaattcattaataagattgaactaaaaaattctcaagagtattcgttaagatagcctatgggcaaacgaaacaaatcgttgtttcttcatatcattcacactttgattacactgtataataaaatatgtattaaaagaatttgggactctattcaaggactcttttaattgaaatagcacaattttattgccacatccttttaaactcttttctttattgtgacgcagacacattttcaaagacgtttttatgtcactcccaacgacatacacataattttttcaccaaaataaaaaaaaaaagaatctagaaaaacaagaaaacataaaaactcccaaaggttactcaaagagagaaatggtttaagaaacagaaaatagttcagtaaggtttttttttttcaataagacgcaatccaaaacaagatcagttagaagaatagaaaaaaaggaaaaaaaaattggaaagaaagaaaaaaacaaagccaaactaaacaaaaaagacaggaaagcggaaaaacaataacaaaaacaacctaccaacatattttgacatactgattttacgagtaattccttgattggttatttgaatagtatattaatttactttgaaagtattgacaatgagtaatacaaatgtattgaaagacatccatacagtactaaaagcgtatgtatttcgattatcagttattattattaatattatcgcaaattgacatacactttcacattcagagtgtatttctttaaagttcttcagataattcttttaataacttaaagtacagattatactaacagacatgtttattctataatataataatactctaacgatatatgtacacaatatatcaataccatattatctaaatagtgcttctttgaaatgcaagatattaaatgaaaagttccctagttcattctttgaacctaatccagataatatttatacatcatataccaaatatttagaggaactaacagatgatgataaaaacattataaatgagtcagaattacaattgacaacaatctcacaaagatttgatgaaagttattatgatttgaaaaagggaggcatttacaagctttaccatgatattaaattagtatgtaccatgctgatccactactataatccaggtaccagaaattatcaaattgtagataaattttataaatttgcttcggaattgattctaagagaatgctataacattggactccaattaatcaaaaatatcgatattatagattccacagataaggatatcgatacggatgaggtaaaaaataacaccgaattagataaagcaataagtagagacttcatcaaaatctcaaccagttataaaattccaatcccagagacataccacataaagactaaagatatggaactattttcatctattatcaccaagtctccgttggaccatcgagtcagggaattgcctaataacaattttgaaattaataagattatcccacagacaaatctttttgaagaagctccaagattagggtttatggctgcaaacactagcaatgttccagatccaacattacctccaactgaaattatgtcaagatttttacatccaaactggtatgcattaccaactactacgtggttaaaatatggtgattatgactcatttgctccagcctttaatgagagtggtactatattagatgctacagcaagaggtgtaatgtggttgaaaagaatcggatatctagatctaatatcattggccgacaataaatcagaaaaacacaacactacctctgctattactgttgataataatgaaattaagaagaataaatcaaaacaagaggatttattaccacaaaaagaagacaaaatatctgacgaaaaaccaacaagtcatgagaacactaatgatagccttaatactgatagtaataaacttccaaaggaacaaataatagaaacagaaaaggaacaaaccaaaataaataacgatcataaggatcctgaaaacaacattaataatagtgataacaataaatcctctaatttaaatcttgaaaatatactctcatggcatccatctcactacattgatgaagatgaaattaaagcattccaagaaggtacacaatccatactggtcaagaaactgttattgcaaattcagaaattaaggagagaaagagtattgaataaaatctcaaaaccatcacatgaagaaacaagattgtattttaaagctaaaagaatactaaaacaaatcataataaataaacaagttaaaagcttacctatctataattcaaactcattcccaattatgcaagccaattatagtggtaccatcccagttgtacgcatacatattggtagaaaaaggaaatataatactaaaaaaaattaatttaagttattttaaattcaaaacaaagtcacaattatacgtaaatcactgttttatatccattaaagatagaatagtatgtaatattatataagctagatgaaagaaatagaaaagatatggactccatttttaatatttattaatatatattatatgcttgttattcctaaacatacatattcaaaaaaaaatgtaataatatagtactatgcttagaatgctaacgggaagtagaaatgacgatatcaagaatgtaaaatgataattaagaaattaaacaacgtaaaaggataaaccaaaaaaacaaatgtgttaatatcgttagaaatgcacatcttcacctaacaaaaaggacacaactaaatatgtatttaaacctccaataatagcccaaataaaaacagctgtccatgacaatagacgactgtttgtgaaatcactcgttttcttaaactcactatttaaaggtgtttcttcattaattactcttgaattcacttcagaattagttaactcgccatattgatcagtaacagtcatcagttttctatttgcagtaaaataaattaatggtgctgacacaactggtaaaattaatgataaaagcacttgtgacaaattaagaattttcgaaataccactttcacccatagtgaaagccacgaataaacatggtacaacagatattagcctagtacatagtctagttgcccatggtggtaacgaccattccaaaaacccttctgatacaatttgaccagcaattgtacaaataataccagctgattggccagaaaacaacattgccaaggcaaatatcatacctgctgcaggagatatataatgaactaataattcataaattgataataagtctgcatcctcagcttctggctgacctgctaatgaagcaccagcgacaattaatatagaagaattaacaaatgttgcgattaaaaacaaggatactattagttctgcatatgcaaaatttaaagtatatttgatagcgctcaaactaggacgatcttctatcttaccaaaatgttttctatcataatcatttaatcttggtttaacaatggatgaacctagatataaagaatgtggcataactgtagcaccaagtatacctaatgaaatatataatgcttgtttctcttcaaagataatctttgatggtaaaaatcctttaaataattcgtctttatgtggtacagtaattttacaaagttccaatacaaaacagaaacatgtggcaataactaaagtacccacaaatatttcaaatgtcctaacttttttcatatcttgtccttctggcttatagaatattaaaatgatcaaaacatccagtacagttaaaacaacaccccaagttaaaggaataccaaatataatttgtaaagcaactgcagtaccaacaacttcagccaaatccgtggcaatgatagccaattctgcaaaaaaatacaaagttaaatttagttttcttggtaaatttctacgacaattttctgctaaatcataacctgtaacagtacctaatttaacacataaacattgtaatataatagcaaatatgtttgaaataaaaacagaaaataataattgatatttatatttggccccacctgacacacttgtagaataatttcctggatccatgtaggccacactaaccatgatacctggtccaataaacttgagaaatttttgtaatatctgtatgtatgacatcctcttaataatattggatttattaaaaatattttatcaaattagaaatataaaacacaccttttggtcccttctaagttaactgctatagataaataacatgaaatgaacgagcaaacaactcaacaaatgtcttaaaacagtcttcttctagtgttgataatataaatatatctatctatgtatatataagatctgatcaatgttagtgtcgaataactttcctgaacactttgctaatatacaaaaacaagggagagttgtggaaaaacagattgtgtgcactttttaatgttatagcaatacctatatatatatatatatgtagctttttcttgcctttatcgaagaaagttaataaatgatgtttataggtgtcgtaaatcaaatatttttagtgccatcaaaaccaataagcagtagcattataataagttcataaaatgctttcgcgacgtttctgccttttcttctgacccactattattaaaaaaattttctattcttttcttttttcaatttgagcttatccaaataaatcgtaggtttccatagcaacaatggccagtttgggtaactgcaccccatattttcgtatctgcagaagagcagatccctcgaacaaattgaaaaaccagactctcctaaaaatgaatgataatacagaatccgacaacggtagatgaaaatgatagtttctttaagatcagtcaagcgcttcacacctgtatacgaatattggtcaaattgtcatctatgaaaccatctacatgactttttgtcctcctccattatcaagctttgtcaaaaattgtgggatcagtttgtctatcttctgtcccctttaacatgtaccaaccatagtcagttttctgcaaagaatttatcacctcattacttgataaattgctaatctcagataacattgcaactagtgaattggatagtgcaacagtaattcttttatcccatttttcctcataattattcaggtttctagagaacatgtagatacatttggtcgaataactatttgtatattctgaatataaagatagatgccttttcaaatctcttttaggaataaatgatgatgagatcttaccatcttgattaattctagaattataatttttttgaaaatcttccttggctgatatgtgaagattattagtaaaagtagtcctacccgatgaatttatttttctttctttcatttgttcattcatattttctaagttgtttggtcttttgagttttgaaattgttatgggattagatagtgagatgtctttagctaattttaaatcatcatcattaagatagctagcttgtttataattattagttaatgaagatggcaaagatacactatctcgtgattgacttacacctttaattttatcacttttatcctgcataaattctacttgattgaaccaaagttttccccagttgctactgctacaactatctctattgtctgataagaaggaatcagagtttgttgtgcttatattcttttttacagcactaccttcatcataatcttcattaattactgttgtagaatctatagatatatcattattgaataaactaacttcttttacttgcttggtatcattctcattagtatgtgatgtagtatctgggttcaaatccaaatccaaatccaaaaccattaattcggttgaacgagtcttatggtcttccctatctaattggttcccctctacttgttgttggacatttttgtctcttgaaccattttcaaaaggagaaatatgtattttcctatattcagagtttagtttgctttctaatattgaagtaatagcttgttcaaaatcattcattatgacttctttattatttatcagtacattatttttcgccggttcaatatttatgtcgattaaatttcctgaacaattaaaattaatataccaaacatgaggttccaaaaggtcaaaatttttgtaaattttatttagtgatttattaaccctttgaccaaaatctaacttaattgataatggacgttgatttatactaacaaatttgagctgtttttttttattaattatttccatctcgggtaacatatttggcaatatataatcaatgctgaaaagattattaataataaaattatctttataccaaaaattcaattcaactggttttcttaaagaagccatgcttgaaagcagtcttactctggatatatttgagtttatcgaactatataattgcttgttagaagcaaacccatttcttgaaagtgataccaacgaaaaaacaaatcttatatttctgaatgataaactgtaatgattaactaagttggatatgcttgttacagttttatcaactctaccttgtaactctatatatcttgcacgtagtccacccagtaaattttttataataactgtggtacctgtaggggcagggatctttcttctagatttaggaataatagcccctttcttgtcgactaaccaacgttctgcaatattatcgtattttgttctagttataatttccagtgagccattattggcaaccaaagtacttaagagaaataacgcttcgcctctaaaacccaagttcgaagtcataccaatatctaatatattttgaatctttgaagtggaatgatttaaacacatcattgatctatcttctattaggacaccctcaccgtcatctcgaacacatatatactcacaaccacctgttttagaatccacatcaatcgatatagtttttgaatgtgcatcaatactattatccactaattctttaattgctgaagtgggatcaaatatgtatgaacttgcaacaattttccacttggtatcttgagaaagttgttttattgccatgttataacacaggcatccaattatcaaacgttgcagaacaaaaaaatacagataaacactgttcaaaatacagttattttagcccttatttatgatgtattcttattcgaaaattcttgaaaaaagaattcttcaattattacttatttgataatctattcctttactttatgctattatattttctgagtctgcaattggtggttattctatttaaagttatttaactcattgaaataccgaccaaaagataaacacaaacctaaatgacaaaaccgtgaaattataataacacactcgagtatccttctttttgaagacttaagtaagacatattcttcaacaactatcaccttggttagtttcttttataagcatatatatatatatatatatatgtacacattatacaattatagattgttagaaatggattaagtaaactaccaaatttgaataattcctgtgcccgcaataagctgctaatgtgaagtgttcggtaaaaaaaaagtttctgttgagtacatgcatcttttgcatatttaagatactgcatccaacaatattctttgaatgaatactctgtacatattctttttttagtatatcaaaactaaagttataataactctaattttgatagaaagtctatagattctaaaataaaataaataaataaatattgtcataagatgcaacaagtacaaaagatcatacctagaatcaagatttaatatatgtatatatatggatattctcttctttgtttttctgattatcacgctttctagttcttcctacagtaacctttcaagatatcattattcctttgcaagtgtgcataccagaaataaactcttcttaaacaacaaaatgttgcaaaaaattttataatatatataataaacgaaggcctaccacgagagatatacttttttgaaatataaaattaggtaagtaatgcttggctgttgtctcctatacataacacataaactagactctacacaagaagtaattaatatacacagatgtacagatacttagatttgtataaacaagacaatcaagaacatcatcgtcgattaaagagttcacaagaccgtttataacgacatcaggatttcatatgtcacataaccttaggatcatcagatctccaattgcaataacccttaggttatgtgtttctgataacagttaatcttgttgaaatcgtaattattatagactctttctatatctctaaatgcaatattcctacatatttatataactatatatcctaatctatgataacctaatagtatacacttacaaactctatatttcaacttatttaatctttgattccatcttggttgttctcttgtacttatgttggttactcctgtttttatctatgtttgtaaaattttgccaaaaaaggaaagtttagaaaaatatcgtcaaccctcatttttctaaacaaaaccctaaatagtaatatcagggatattacaaatatcaaagatattacaccaatacataaaaaaagagtggacgcgaccggaatcgaaccgatgacctcttccttgcaagggaagcgcgctaccaactgcgccacgtgcccgaagaagcttatggttgttgtggaatagaatagctataaccatcaagattacataagatcctgaatgaatctagaactatttattgtgttaataagccatatacgtgctacaacattagatgctgcataataaagagattggattacataagattttggcaaatctagaatttacctattgttttaataagtcccacgtgtattactaatcaccatgattagagaattggggtgcagttctaatccactagtgcacctaaattaatgttgttggaaaatgagagtttattactgtcattttcataagaattatttttaattagtttttctatatattatgtggtgtacggatgtacataatatcaggaaaacattttaattgtcaccaaatatgtctttcgaagatttgaaaagaaatgaaaaactttaaaagaaaacttaaagtaaataaaagaatgtatcctgaatacactatataataaatatgtacaggtatttaatacaaaaacaaaacaagtatctataacttaatgatgtctatcattaccatggacgcagaaggctccaaattccaacaaatgtaataaattttagggtgaatcagtcaagtcattaacgtactaatctgaataattgatcgagctccagaaaacatataaaaggacaacgttttctgaagataaaagatcatcttccataaccatttcttgtaaataatttatatattataaatgaacaaaaagagaacaacaagcaagtaacaagttaagtaactttgaataaatatattagctcgttaaagccgctcaatatataagaccgttttagtaattatattatcgcctataattgattactgtctcgattacttgaatgactattaatattatttgcgcttccctggaatacacaaagaatttcatcataccatactacaacaagtgttgttgtggaatagaatagttataaccatcaagattacataagatcctgaatgaatctagaaccaattagtgtattaataagccatacatgtgctacaacattagatgctgcataataaaaagattggattacataagatcttggcaaatctagaatttacctattgttttattaagtcccacgtgtattactaatcaccatgattagagaattgggatgcagttctaatccagtagtgcacctaaattaatataataaattttagggtttgaatcagtcaagtcattaatgtagtaatctgaataatcgatcgagctccagaaaacatataaaaggacaacgttttcaggagataaaagatcatcttccataatcgtttcttgtaaataatttatatattatgtataaacaaaatagaacaagcgagtaacaagtcaagtaacttcgaataagtacattagctcgatataagccgcttaatatataagaccgttttagtaattatactatcgactatagttgattactgtctcgattatttgagttactattaatattatttgcgcttccctggaatacacaaagaacttcaccacaccatactacaacaagtgtaacagtaacatggtttcgtggtctagttggttatggcatctgcttaacacgcagaacgtccccagttcgatcctgggcgaaatcaatttttattcccacattaaaatatcacgtagcacgatggttttgatatataaaaattacagtatattataatgcacatagatgataaaagatacacctgtttaaaatataaaccaagttaattaatttttggttcccatatctgcatatgctgtacaaagtaaaatggtgtgaacaatgtcaagtgggatagaccaaagtatgcgattccaaaaattgatacagcaagataaaatgtacatacaaaaccatgttatttgtatgatatagaaaccatggttctgttatatcaacatttaatactcaaaaacaggacaaatggttgtttgcattatgagactagacatagagatttgaaatcttttaaatttggaaatagaatacttgtagataagaatgcctctgtgaggtactatatactagttatacattctggtataatatataattcggaaccatccgaaagtagtgaaaatgataggagatccaaattttggaattggaagaaacaaattaaattctaaaggacattatatattcaaaattagatttgtgataacattctataatcaaactctcaattttatcaagttccgaagagaacgttgaaagaacagagaaagcaagtctggggaagttaattaaaattataaatgctaaaaaggacaaatataatcaagaaacattattgctaattttatacaaatgtagagaagctgatccagttcaagttagcaaagatgaattgaagaaaatgctacacaagagagaatcgtcgagattatatgaaaaattcgaaagaagcagctcatggtttaaaaacaacatggaatctgtttcataaagaaaggcaattatagtatcctagatattactgtattagggttttgattattggttttggaagacaaaagttaccagtatttttctaaactctctttttctttgaaaattttacaaacaaatcttgttagtaaagttataagaaagttattatgtatagatacacacatataaaacagaaataattaacagaaaataagaaaagagcaaccaagaataatcaagaatcgattagtaaagtatataatgtatatataacttgattatattggttcagttatgtaataacatcatatctaaaaatataaagagatcctatttcctatacctctttagtaatgccgtttttaccataattgttttcaaatcacatactgtctaaagttcatataaaaaaggcttttatcattgaacctatacatgactcaaagaattgcccaaatagaagaagaaaaatagaaatagaagtattattatccaaaaaaaagacagtaatcactagagggtgtaataaatatgataacagaatatgtatttatatgcatatgtatatgtatatataatagtaaaacactaagtaacatttcacaactataatcttatgttaacttagtgcatattattaaaataacaaaaaataattaattaaaaaaaaacatttggaaggaaaaaaagggggaaaggaagaagctaataaaagaaaaatatgtgaaaaagaaaaataaaaaagagtaaatcaatcaaaaactttgctcgaggctacttactcagcactgacattaccagcaaaaatgcccttttctctttgttcatcccatttttcaatccaatcaactggacaaagtgagttatacgttctccagaagactttgcaaggagcaaaatcctcacctttgatattgatgcacttgtggtaatcaacataagcttgccagcaatgtttggtttgattttgttgaggaaatctagcatcgaaaccgactgtgtgtaatggagattcttcagtcttaatttgggcggttgcagtatttatactgttttcttcgctcattatttattaagtatatgtgtttatctgtaaatgaaagttgacgaatgttttaaaatgtaaaaaacagtagtaataacaactcctctatcactgagaaatagtagttataattgaggttttacgttagggagtcacagaagacagcttacacaacgtgtacggagtacaggaaacattgaagagcatgtagattagttggcaggtgcacgcgctgccagaagcacacatacatatatataagtatgtataacctatgtttatatatatacatatattagagataacggagttaactagctcgaataaacacaagaagattctcacctctctttggacaaaagattacatttttactgttcttctttttcccccagcaaaagacaaattttttctttgttttcggtatctttctcccaaaaactacgagtacaagggttcgacctgttattattggttgagagaaaaaatgtgagattagtaaaatatatcactcaagtacagcccagattcagtcagtttgttgtttggttcgttttggcttattcgatatatattcattgtctaaaaagtacactcctctatctacgctaattgtcattgccgcgtgacagtataaggtttgttcagctaacatcttagcataacatctcaagagccttctggaccagattagtgttattttgtttatccaattcttttaagaatcgaatcaattgaaaacacatgtcccatgcctcagatgcacgactaggttcatctgtggcagcagcactagtaacaagtacatttaaaacacgcaacattaattcttcatctgtcagcgtgttgcatatcgagtcattattacctgattgaaatattggattgttgtttgtatctatagtagaatcaacaataattttctcttgtctttcctcatgctcgtcaatatcaggtaatttcgtacttggttgattttttctattcttggttaaatctttgataagacctgtttcgttataatttaaaaatactagcaataatacacccaaggttttagcttcattcccctcaatacatatccctaatagatccctgggggtcatcttgagactattgaatagtttactccaatattggatctcaatttttctcaaacaattgctgattatctccaacatatcactatatggatgttttttagattgacccattggaatagaacatgccttaactaattgtaatatctcagtcaaatcttcatctcctagaaccttggtggataatattttctccaaagcaaacttataatgttttaaaccatagaattgaaacgtaatcgaatctggagtttgacctctctctaactcggctattatcaatttgtccaagtaaatatcatgtttaattacaagcttggaaaattctttgttaaaaacacaatctaatttatgcaatattgctgattcaggtgtgacagagataggatatccatcctcatcaatactgattgtcaataattcttttttttcatcccataagtcttccagatcgtatattgtatacctattagattctataagataaatcttgttttgcaaaatatcgataatacgttcaacattatgtaataattctatgttttgccagtgaccattttccaatttaagtagcctgtaaatcttatcacttgtatatagaagtatgtcatccctgatattcatggcccattgaatattttgtaagtatggttcattagatatattaactttagtatactcaaatattttttttaagacattgataccattagaatatatagcagaaatgacatcgaagaaaattatttcagagtttgtaacaataataatttcaccagttttataatatttttcatattgcaaatactccatattctgatctttggatttaattttcaatggtttaaatttgcataatgtgttgacatggaaactattaattattgtggatgatgagaccctatattcccatactagcatatcagtcaaagactttgtctctgcaccttgaagtggtacatggatacattgtaaagatgcattaccatcatcatttatcgtattcatcaccaagtaattgtttgaaagccattgtaaatctattatagtaatctcaggataattgaaccatacattggtttcaagattatatattaataaaatatttttgttcgcaatgtatgtggccaataattttaagttcccattaatcctgatcagggaaatatagttatttaatgatttgagtggcagttttatgataggaaatctatcatgatttaatggagaatcaccttttggagaatataacattatatcattatctctttgtaaaataaaagtaacaggtgtcctaaaattccattgaccctgttttgcttctttccataattgccaaagctgatattgtccatcctcagtagtggtaattaatgtatcatgaaaataagaataattagaatattgaaataacgggacactaagtggatcatcctcttcataattagcacagaataaatggttcccattcctcgaataaaagtaaatatcattttgtgcagaaataaaaataaatacatcatcattcacatatttgcataatttaattgaaaacggtacagtaaactggaaggtaactttatttaaaataggatcaaaaatcaatactttcttctcataaatgagggctataccataaccaccttgaaatactgacacaattgataactcctcacttaaaactgtagaatttgttctaagattttcaaaatctatttcattaataattgtctgctgtgtatcgctatcatacgatactacgataattttttccttgaaaatacatactttaaaaccctttaacaattttattaatgtactatctataaacttaaaatctactagatttaacacttgtaatccattttcatgtaggattattaaattttcttcatacctcccctctttaatactagtgaatttcttaaatccgaaaacatcaataaggttaaaatcaaattttagtataatcttaagacgaagttcaactcttttcactgggagttcatcactattatcttgattgttcataattctttgcaataacgatttctccttacatgccaccagaccattctgaataatcttggaagacctgtttgtttcaaaaactgttaaagtatcatcatccaaattatcgtcatattcttctgatacattttcaattaccttagaaggatcagttacaggtaaaccgtaatccctaaaaattgtgataggtgtagagtttttcaatatttgataagtaagtaaaaaatgtttctctgttgtaacataaaatactagttttccaggattcgctaaggacgtatcattctgataatctaaagaaaatttattagaagtatattgaaatgcattagacgactttagtgatatatttagtccgaattcatcaattgaagcttgtgttctttcttgtactgcaaccagagctattggttttaaattatagatcaatactctgctaggtgttaaaataacaacgatatttgcaaacggtataattagaatatccaatatatggttgtcattgaagtcttcattatttaatttactagatcttgaaggtattttaaattgacttggtggattgattggccaaagtaacattcttctggaatttttttttcttctagttgtttttttttggatgctcttcttgattaactactaacgatacttattcttataagaaacttcttaactagtagatttattaagctatgattgtaaactttcctttaatatatattattgatgtttttagaaaacctattacaatatttttaatttactatttgaatacaaaaaataaataaacaaaaaaaaaataaacaaggaacgagccactaaactaaacattagataatctcatgtgaaaaaatgaaacatgtaatttctttttaaaaaaacagattagagtaataaatgaatatattgttatatatatattcaacaggatcccatacaattgccaccaacataacatatgcatgatacgtgtataatttattaaaaaatcaagtacccaataatcaaaatattgatggaaacaaagaataaataaagaacaatcaaataagttacataagtagttgcttttctcatttaatatacctacatataaattgataataaaagtagatatagtgtccaatgtgatgtttttccattacaaataatattactatgtaagccattctctaagtttatggaagatactacctgttctataatttcatcatcagattctgtttatgttgaatctacaataatgatgtatatagattttgtttaaaatgatgccactgttcaaaatattattggatgatatctcacttcataaaaatgtttacaatatttactattaataaactgagttattccttagtgtaaatctgaaactgccagagagaaaagtcttaatggctggacgtactccagtggaagcaattttagatgtgatacttatagtgcaatcaactgtagtcattgtaaataaatcatctggtaattataatttaatcagattaatatcatttggtaataaagaatactgagaaacatacaataacaaacgtttaaagttttatagaaaggaaaagtttaagcaataacaattactaatcaatgtctatattaaatgatactaagtaataatcataatccataatttttaatagcctgaagcaaaatagtacaatttttcgtcaaatataaaagacattctttctaaattcatatcaaagtcataaagaaatgctataaaaaaataataataaaaagagggaaggaaaatatgacatattttaaaaaaatctattcatttaaaacaaaaagaatattagagacaatatgaaaaataatgtgtctgtaggaattaccactgctccatggttcccggaaccaaaactagtttttgttttaaaattactagacatagatgtggaatatgtagaataattttgtttactgatatcagataatgtaattcttgttctatacggattagtaactgtggcagtgcttttattggtctgcaaagcagttgaagtctttagagtggttaagtttgcattattttgcgtaggtgtgctaaacatggtttcttcttcgttagtatatgttgcatattcataagttatagacgatggcagatggagtagaaaagtaccgaattgatttatatctattgaattttcaaaaatattggttgtgaacttagcagaagcagtaataagactactttccagaatgaaatcactatcttgttcagatttgacacaagtagaatatagtgctaacaacaatatgttcaatataataactaatttcattttaagtatcttatttatttattatttttctttttttatcgccattttcatgacagtggaatttgttcctttaatactgaagttttattttgacacgacgttacctcatatcttgtttttactatatatatatatgtgtgcgtgtatgtgtgtatatgtctacaaaaagaaaagttataaagtttgttattactcaaacttacaagaatgtatagtttaactaagaaaacagttacatacttggtacaataaaactaatatggaataaactatatccattacttcacatagttcacacttgaaacaaacactattctttttttttttttttctttttcttttcttttcttttttatttctaagttttgttaaatccaagatcatcaaataaaagaaagaagataaccctaaagtagtgagaaaagaactaaaaatagaaatatatttaggtatcgcagaaaaatgttgggtgatgcatgcaattaagaaaagttttatattttaaacttttctttgatcttgacacgaaaactgagatagacttttctttttttttctttcaacacaatgttattcacatttgtagatttagatctctttttatgtgcatttcggactaacactctacagatataacagattctgaaaaatattttttgatatttattccagttgtgctgtattagctacacacttttagacgttcacagtgtgctaaaaaagaatataaactttactagacaataggtgggtttggatcaaatgacgtaatttttaaatccggaacaggaagttcgattgttttgttttgtcaaagcgttcctcccaaaaagaaaaaagaaaaaacagaaaagaatgtgacaggtttcagaacaagaatgtcatcgtggaaagtccagaattaaacatgcagaatgcaaaggaataaaaaaaataaaaaaaacaaataagaacaaatggaacacattgtgttcactttataggaatttgatgttcctggttcctacctttatcccctttcaaccaacattaaactttgaaataaaaaaaaagacaaaaagtatatgaagggacacttttatcccttcttaactttcgttgcacagaagaagaagaggttaaaaatcaaagggtaaactcttcgtaacaagacactgtaacctcaccttttttttttgttttactttaatagaacaaaattgagcttaaaagttgaaaaaaaaagaagaagaagaagaaaagaaggtgacaaaaattgtatcatatatatatgtatttttagaatcactgtcaaattgcagtaatgtatgtatatcatcaaaatattacaatctccttaatatatatctatcactattactttgtgttcctaacactcttagttattttgttttgttttgtttatttttttgtttttataccactgaacatttctcttagttatcgacttttgatcaggttagtaaattaggaaagtttcttcaaaaatcttctagtttttaaagggatattaaattgtattacttatttccattttgaatcttgcctttagtgaacaacgttgatctattgaaggaagaagaggaagctaaaaggaagcatttaatattaaattaagttgtataaattgaaataaaatattttacttttttttttcttagtttcttactaatggagcttcaaatatatatataattataatttttttattgcttatattcatcatatacaatgatacaaaatgcaaatctatataaaataaatatgaacccttctaataacaataacaataatataggttactcaaactgggataaaaaaaatgatgttctcaaaacatttagacacataaatcctacaataaataaactcccttcaatttcatatatgctaatacctcaacaaaaagacaatcaaaagaacaacaagaaagaaacagttatagaaactaaacttgttgagacagcaggtacaaaagagacaaatagactagcaaaagagaatctgttccattcaagttctccactctcaactattgccatagaatctacaaatcaacctgtaaactatgaattcagaattccagcatcacatcaacgtacaagttcattagattcgttaatgaatgctgccgaaaacttagaacatgtagaccacaatttacaatcaaaaataccaaatctacaaagaatcaaaagcatgtttctagagaatattaatgtcttggaaagaaaatattgtggaaatattaatcaaaatttgacaacaataagagaagaagaaatatttgaaactttaaggaatttgcaaaaattgtctcttgaattacatgaactgattttggatatattagaaccacaaagaggagagttggtagctacatcacaatctatatcaaacccttctctttcaccagctgaaaaaaattccctttctaccatagatttacctcaacctcgcatgactttattaccaccactaatattaaatgaaaattctcagactatcccaagaatgactggtttcaaattcccatatattaaatcacattttttaacaccaaatggaaataataccaatctccaaaaaaaagtcattgttgaagaagaaccgtataatgcgcctttagagcaaaacctacaatataaaccactagtgtttaacaaaactaatcatcttttacaaacaccaaaaagagaagagtactcaaatataacacccaattatgaaacacccactgcccagtctaatctagttgtcacaaatccatttaacaaatctggaaattcttttacattgtttccccaaaataataatggaaagtctacaataataacacctgtttcgcaaggtaaaaatcatatttcacaaaagaataaaggaactgcaaatacagtgtttattccgcctttgaatcatgagccacaaacggttaaggtaacaccgaagacgtcaagagaagaagacataatattttcagacttaatgcaagtagaaaatgaacccaaaatggatatcccatacaacgttaaacgaataaagacaggatcaacaacaaaaaatttaacgtccagaaagggggcacctattggaattacaacgactctcaaactaacaaataaatcactgatggaaaaatctattaaaaaatataaacaaaaagaagaatttgagcataatgaaacatatttaccaacaagagaatctgttacaattggaaaacattttgaaaacaaaggtccaataatgcagatacaagatatggggaaaatagaatctaagaaaaaatcaagagagaaagataaaggagaagaaggagtagaagaggtaaataagaaatgctttcattgccaaagttcaaagactccagaatggagagcaggtccttatggcggtgaaaatatatgtaacgcttgtggattgttttatcgtaaaattgtttctaaatttggcgaaaagggtgggaatttgttgatgaaatatagacagttagtatgtccaacgaataggagagtgccaccttacatagaaataccagaagaatatatgataagattcagtaaagagtcaggctttaatcaattttctagttgaagtttctttttgctcaaaaaagttgaaaaagataaaataactaaaaaaggacaattatggacaatatgtatgtatttttatgtatcacttacttatatctaaatattaattcaaaataaagtttattaatgctgcaacaaaaaaaaaaataaaaaaaataaaaaacaagaaaactctgtttttaaatttgtgacactttaaaatttttcatctatagttttgtcgttagaatgatggaagccaaagtaaaaacaaaaactaaaaaaaaaaagccatatttgaatgtgatgtatgggtttataacaaaacaggaaatttcagccttttccctccccgccctcctccatatcttcagggagacgatgaaaggggaggttgacgaaatatcagcaatagaggaaaaacgcatcaactgtttgctataactaagatatatatataaatataaaacaaacaaacaatccttttgcatcaaactcttttatttttatttaaaatatagctgaagtaaaacaaaaaaacataataataaaatcaataactagagagaaagagaaagagaaagaacgagaacaattatggttaaggtttgcgttttaggtgcatttggaggcattggacaacctttgtctctgttattaaagataaacccttttattaacgaattatctttatatgatatagcagattgtcatggaataggcactgatctatcacatatcaatacaaagagtatcaccaggggatttgataaaaatgggataagggaggcattgaaaggtagtgatatagtagtaatacctgcaggcatggcaagaaaggaaggcatgaccagagatgatctattcaaagtgaatgccggcattatgaagactctgtgtttacatatcggacaagtgtgttcgaacaatgtgaaagtattgattatatctaatccagtcaattgtttggttcctgtggccattgagacgttcaaaaaactgggtaagttgcggttagaaaatgttattggtatcacgatgctagatgtgattagagcagagacatttttaaggcagcatctatgtgaattgggtgatagggaaaacgatccattggaacatgaaattatcagtgttgtcggaggccattcagggacgactattattcctcttataatggataagagaattatcaaattcttaggggtggaaagatatcatgatttgattagaagaattcagtttggtggggacgaagtcataaaagccaagaaaagcagcggatctgcaactttatctatggcatatgcagcagatgaatttattagtagtatgatatctagcatggtggtagtggtaaaggatgctgagaggatagagtaccgtagaagacaaaaatatagataccttcctggctatgtttatcttccaagtgtgaaaggcgggcttgctttgaaacgtcggctaagacaggttgctcatttggacgttgattattttgcagtaccattaaaattcaagaatgggtcgattagtcatatagatttgaatgtgttaaataatctatcacaagaggagattgaattgttaagaattgctataggaccgttacaagctaatatcaaaaagggagaaaagtttgttagaaatactgcgaagatgtgaaaggggtaaccgactaccatactatagcgtatatatacatatacatacatacatacatacatacgtacatacatacatatatatgcatacgaacatatgtgtgcaagtgttttacatgaacctagtcgtaatctataaattctacttcccctttttccctacccagttcttcgaccgaactttatcccgccatttacaaacagaagaagaactcccatagaaaaatattggataataaacaaaaacagaacaaaaaggaaaaaaggtggggtgagaaacaacattttaatatttttgcaatgttcatgaatacttggagttagggttggattacacattttttctatgtagtatttaaaaaaaatgaattatctgaagataagtcaataataagtcaacaatctttgattcatctagaaatacgttacatttataaccagcaattttacatcttttttttttccttggtatctggagggaggtactgtattgatcacccgggtaagcaataaaagaacgtataccgttctcttcttcactgcaaaaggttgtaatagactctattctttttaaaaagaaagaaaaacggggaaaaaaacacttttttaggggtacattttttcgttttcttttttctttatttttttttattctttagttttggcaagattttctttgtgtgacatattttaaaggggacgcgctgtcagtggagacgtgtaaaagcggtttcttccattcttctattctttgttctgtatttctcccctcctcccctaaagtttggtgtggaggcatctcgggacagcggaagtgaaattgtagagaaggcgagggaaaagtaagagggaaaagagaggggaggacagaaggaagaagccctcaaacaaatcaaagaagagaaaaatcacaggttggttctgattctgcacaccttctttggcagaattcagaggaagaacagagaggaaagagaaagaaggaaagaaaagcgaataaaaggtttttggtttttgatcttggaccccacatattttaaatcaatagatatcgcttatctattgatttgtttatctacgtttcaaacatcatagtgaaacacatttgtaaaaaaaaaattatatctttgatattctcgttcacatattagaatattcgctgtcctgtttggttgtgtcagtcaagaattattacaaccactactactattaaaagttgttgagatatcaacagtaaatctcttctttcattctctacaactcaccctcatttttttttctcctttctgtttcattattactgttactttgtgatttttgtatctcacagtgtgcgattcccaatattctctgtttttcttaatttttattgttctagttttaattttttttttttcattttttttttgtttttgatattcaatcttttaaatattcctattccattaacacatattagaagttgttgattatcaaataagcatgaagtattaaattagataaaaaataaaaaaaaaaaaaaaaacaagaaacagaaaacagataagaagaaaagaaagggaggaaataaaaaggtaaaaaaggatagccagcagaaaaaaataaaaaataaaaatatcgttatactaatagtaaatatatactactttgtcattgacagataaccatataatcatgaatattcaatatactagtcctgaaatagtttataaacaagtatatcgtggccatcctggtctagagaataatagttatagtaataataatagtaatagtaataataataatagtggaattgaaaataatgccactgaacctcactctaagcaagcacctgaatcaatacaaatatcgtttcctactacagaagtcatcggacatggctcctttggtgtcgttttcactacaacaatacgggaaacaaacgaatctgtcgcaattaaaaaagttttacaggataaaagattcaaaaatagagaattggaaattatgcaacaattaatacacccaaatataatcgatctaaaatattttttctatgaaaaggatgaccaaggtgaagtctatttgaatttgatactggactatatgccacaatcgttataccagagattaagacattttgttcatcaaaagactctaatgcctagactagagatcaaattttacatgtatcaattatttaaatcgttgaattatttacataactatgcaaaagtttgtcatagagacattaaaccacagaatttactggttaacccgcaaaattggtgcttgaaattatgtgatttcggtagtgctaaaaaattgtctccaaaggaacccaacgtgtcttacatctgttctagatattatagagcaccagaattaatatttggcgccacaaattatactaaccagattgatctgtggtcgagtggatgtgtaatggcggaactattactgggtcaaccaatgtttcctggcgagagtgggatcgatcaattagtagaaattatcaagatactgggcacaccaacaaaacaagaaatatgttcaatgaatccaaattatgcagaacataagttcccacagattaaagctatccccttgtataaagtatttaaaaaagaagatgaatataccatcgatttgctagcaaatatcctgaaatacaaccctaacgaaagatttgatccgttacaatgtctttgtgccccatattttgacgaattgagattcactgatggtggtactaagattaacgaaatgataagtgaattgaaacttttagattttaatagcattacagagttgggatatttaaatgaggaagaattgattgtggctaaacaaaagttgactccaagacaaatggctggaaaagaataataattatttgtttaaaatcaagggaaaaaaagaaagaaagaaagaaaaaaaacttaaaaaggtaaaataaagaacaaaaaaaaacgtttatggttagttgaaatttatatgatgaaataagtatggtgaaaattcaacaagtgctattggatacctttttttttttttaacattatatttatgtcttcgatataacgcttctcaaactttttcattgaactgtttttttcaaatatttcctttattcttcatacatttgtgaatacctgggaaagaacagttggaatcagtgttaatgttgtttgttgctattgtgttcaatttaatatatctgtatagatgtacaagaagatgaaaagttttttgagtgagtgagacagagtcggcgaatgaacatctatttatgcataacccgcctttaaatactcacgtatgtaaatcgatacatgtataaggtttttgcttgtttatttatttatttttatttatttatgttttgtgacctcatgtaattatttgttacttactatacattcctattgatttcactagtattttaccaccagtgttcaaatatttgtaaatgtttagattgaaatgaccactcaatcactatcacttagttacaatggaatacttcgtaacaatacgtctgcgctctatcgaagtgactcttttgtttttttttttttttttttttttttttttttttgttcaagagtttttccgaaaagagaaatcggaatctttgagctccagaaatttgagtaaacattttggaacaaaaaaaaagcgaagaatcggctgaaaaaaaatgaatgaaaccaaatattaaagattaagtcctcagattaaaaatcttctaatggatataaaacaaaagatcacaaaaacatacgatgtctttcagtaaattgaaagaaacgaagctattcatagatacaagaataaactattgagtctgatgaatctcacgattaaagtcaacaacttttcatttccttctaattgatttttaattaaccagcatctgtcagaaaaataaaatatcgttttctttggacatagtaaaaatttatatgaacatacttatccaccatctctttctttattatttttctggcaagtcagaatatactaaacacttatctaatatatttaaaggaagagacagtcaaatttgaaaaaaattatttctcttttgtattgcatattttttttaatttttttttcgttgttttttattcacatgacatatgttcaacatcataaactaccagatcaaataacaatagcagaatatatatgttatagactgaaacaattgaatattaagaccatttttggtcttcctggtgagttcaatatgcccttactagataaaatatatgaaatagatgggatgcgttgggcagggaatgccaatgaattgaatgctgcttatgcagccgatggttactccagaataaaatggttaggatgtcttataactacatttggtgttggtgaattatctgtcctcaatggtgtagcaggttcttatgctgaacatgttggaatattacatattattggaatgccccccacaagtgctcaaacaaaacaattactattacatcacactttaggtaatggagattacaatgtcttttataggatgggttcagatattgcttgccattcaagaattcttaatgattctgaattttgttattcacatgtagacaaatgtattgaaatggcatggaatgaacaaagacctgtttatttgggcatacctgtcaacagaatacaaatggtagtgtcctcctcacatctcaatcgaccattaaatttaaatactcttagatatccaaatgacagtaacagccttactgatcttaaactgccgaaagaacttgatatgaaatatgatgaactgatagataacattttaaaaaaaatttatttgagtgaaaaacctgttatagtaatagatgctggtattataagacatcacataacgaaaatggcagaagactttatcaagctgacaaaattcccctcttttgtcacacctatggggaaggggtctgtaaatgagaatttacccaattttgatggcgtctttgctggatcgttatcgagacccaatgttaaagaattagtggataattcagattgtgtcattgttctaggatgtcttttgcctgaatttaacacaacaactttccattttggttatagagcaaaaacaaaaaataaaatatttatttaccccaaatccgttaaaatgaaaaatattacttatccagatactaaaattgaaattgttttggaaaaacttctattaaaatatgactcaaaaaaggtattacgtacatttagtcacattgatactatcaatgtgcctcgtcaaactttatctgacaatcagctcttgaaacaagaatgggtatggcatgaattttccaagtggtttaagccagaagatataattgtaaccgaagtcggttctagtgcctttggtataacacaaattaagtttccaccaaggacacttagtatatcacaacccttatggggatcttcaggtttctccattggtgcatgtttgggtgttttgtttgctgccaatgaattgaagaaagaatcatcatgtaatagatatgaaaattcatctattgaagagagtacgaatttaaaaagtttacaggatcgaagaattattttatttgttggggatggtgcgtttcaaatatcaatgcaagaaatatccacaatgatccgttggaatttgactccatatatttttttactaaacaatgcaggtttttcggtcgatcgatttataaataaaaaatcgaattcgagtaaatttgatgttcaaccctggaaatatttagatgtgtttaatatatttggcgctacaaattatgaaacaagaaaaattgtaacattaggagatctacgagaggtgctaagtgatgaagattttaatattgctaacaagataaggttagtagaaataatcttgccaagcacggatgtaccacctgcattattggaaaaatggattagtgagagagcatagtttaatataattaaggaattattctgcttttttgtattataggaatcctttgattttttcgtattggatgatgccacactttatgattttaaacataacagcattatttcatcaagataaaaaagaaaaattattacacattattgcatatacttaataattatagagtttctacagaattgtgacattttatttaatgatataattaaaattcatataaaataaaaagtttgggaaaattaagaaatcagttaataaatttttctgcataaaagaattgatagtatattggtatatatggatatattgattgatttttgttacttattatattttatcatagatcattatatacattgatgtaccataatagtccctaataattgaattataggtgtattccaattagtttgacttcatatttctagaatattttatttaagataaaccaaatttcatatataatattaaaactgatgttaataatacagtgtttgtaataagctctaattgaaaatcctgaaatacgttgtctgcgggtaaggcggaatgtcgaggcaaagggcttggaccagttgaaaatctgagcccaggctgtgagtgtattcaaataaacgattgctagattgatattggtgacatattactaagaactttatttaagaaacctttaattattaagagatggtgtcaaaggtaattatcagcattaacatttgtattctatctaataagtttcagctagaggaagacaaacgaaattagcaagaataattagaattaatctatctattagttagaatcaatcaattatataatttgtaagtgtttatatatataattaatactcatttttagtatactacttgtgataactcttactgtattttaattataaaaaaatacattgattagtgcaactgttatgtaattaaaagaatttctgttttatttttttttttttttgctctaacaaacatttgaaaacttatgaaaatacccgtaacaaaaaggagagtatttaataaaacgttaaatcctagcgcacaccacattcaatatctaataagaggaaaataaataaagttaaacaaaatattccttacattctaaaataatcctgcatatacagaaaatcatattttattatcaattatcttaatattattaaaaatggattttagcaattgaaagaaactccatgaaaaaaaaaaaaaacaaaaatgagtttatcaaaacctaaatttataccaaatatttctttgtatattacaagaagcttattaatttatttctttttgtttattagcttaggcatagtttaggagatatataaatcttttttttatcaacaagtgcgtgttatttcttatgctaattagttgcaactagtcttgtaagaaaaaaaattatacacatgaaaatgaaagcaacatgtaattgcccattgtttatttatacattaacaagaatatacttttattttatcccaaaaatagtttccattattaatactaaaatataattataggcaaccttgctactgatattaatcaaaaatacattgtctaaaatatatcacattcctgtaaaaatcaaaaatttcttttggagcatatcacacaatattcagtcagtaggaacaattaatatatgttgtaacctattctctcttaactatgcactgtccaatgttatcaaaacttataagtcctttataaacaaaaacagtcatatgttttacatccgcacacccaataatttgcttttttattttcctccttatagaaaaacacacttgtattttcctatttaaaaattgtatgttctgcatctttttttccatttttcatttaggcaaaaaaacaaaaaaaaaaaaatagtaacacagtggggctcattaaagctagaagaaaaaatgattggggaccagagtaaatgtttaacttccagagggaaaacaattttcccttgacagacaaaaatagagaaagaaggacatcccttgtgacaaattccagtttgagaaagttaatttccgaaagagcttccctctatctgctttggggtttagcttgctaaaccaaaacttctatcatgagtatcgatgagcaaaaggtttcccacttcagtcttccaaactagaactttgtattatcagacattctgtggcacttctacgaataactcattgtagctagtgtacgattgattgaccctgcgactgctacacctgtttagattgctcaataatgggaacatgctcacaaccttgaagggcttgctgctgattgcagttatactatggtgtttcttagtatagtagtgaattgttgtgtactgaattcgggctattatttcttgatatgtagtctaagttatgatgcacttcacaaagtaatgcacttttaagtgtcaattttgaggaacaggtgaaaagaaagctaagcataagatgtctgccgtcccaagtgttcaagtatgtcatttaaatcaatttaaacacatagaggagaaaacagagtgtgtataaatgtaatgtgaagaataatataaagatgtgacatatatatctatgaaaaggaataacaatccattctagtttgaaaagaaattagttcgcttaataattctgtgataaaaatactgaataaaaaaacttttttaatagaattatcataagaaaacacatatcattccataaataatcaagatagaggtttcatcaaacatattatacaagaagaaatcaactataatggacttaatgaatgactacaaaatagaaaaaaataataatgtatagataaacatgacaactcaataaatgatagtgatttgcatttatagatggcgaataagtttccagttttattcccgataattcttattgaaataaacagaagaactagtaatttccgttaatgtcgaccacttgccattttgaaggcaagtattgtaccgcgatgaactattgatattttcattacattatacctctgcttctttctgttagctaattttgagccttcataagaaaagggcattttttactaacatagtttattttgatcgattgtatgagcatatatcatatctattatgtttcattttaattgaatcccataacttatcaactttttatgttgttttatttttacgtttagacttttggtaagaagaagtctgctactgccgtcgcccatgtcaaggccggtaagggtttaatcaaggttaacggttctccaatcactttagttgaaccagaaatcttaagattcaaggtttacgaaccattattattggttggtttagacaaatttgccaacatcgacatcagagttagagttaccggtggtggtcacgtctctcaagtttatgctattagacaagccattgccaagggtttagtcgcttaccaccaaaaatacgtcgatgaacaatccaagaatgaattgaagaaagccttcacttcttacgacagaaccttattaattgctgatgctagaagaccagaaccaaagaaattcggtggtagaggtgctagagctagattccaaaaatcctaccgttaagaaagacaaaagcaaaaaggaaatttgtattctatattcattatttactgttattattacattattattctagaattcgtatatatattttttttttattttgactctttctaacaaaaacctaatttcttctgttatctataaatatgagcatattttaatcaatatatataaaactcataagcggaaaaaatataagcctgcaaatgaacaataacagcattaaaaccgttgatatttataggactagagggcctagtgatagcagtaaatttttcttatttctgcacatttataaagtggacaatattattttaaatagttagttaatcataactagaaaccttgccttattgatattatcctcttttaaaatggctattttaagagtaacgatcatctaaatcaataaaaagaattataatgttctataattctttttacggaattttgccggtttaaaaaaaccttaattaaaactttacacggaaatattttggaagggtacaggcttatttaattattccgcacggaggcttttattccctaaagtgttgtaactatggggaattcaaaagttttacaaactcgtaattttttacgcgtctgatttcgcgttcatatcttttttattatattttttttttacatataattttggcagttcgtacaattcaccaaagaattatttctttattgaaaagtaaacaaagatatatgaatgggtcatagatggatgaattattgattgtcttgtattttaaaataatttctacataaaataaatgcatcagaatcgataaaagttattattaaaaactgacctcttctttggcaataggaaaaagacgtatattcatatttatacgtagtagacaaataacaaatattgaagaagaaaaaaaagggtgaaacatacgcggcgtatgacaaatgggactaaaagacaatattccattagaaccatcacaacttccaactagtaatgtttttttaaatacaagtaattctattaatgactctgatttgtttcagtctttgaaagcgggcgaatcattaatcaaacaattgcttgaaaacaatcggctgttatcaagtgttaacaggaccgatgattctaaacaagacagtagccttaatacaccacaaaatagccagagccatgaatctttagatgaaaataatttggataaaattgatgaaagagagatatttaatacgatacattctctagtaacatctttaagagcagcaataatacaaacacaacaactaaaatataaatccatgatccaaaacactatgaatagtgaagagatacaatctaggattaatgtcgagaaaaacttacaaaaacaagaatttgaaaggattaaaggtcaactactgattgagaaaaattcattgttaaataaggttacaaataacgaaaaaaagattaggaaatacaagaaaagaatcatggaaaaaaatttagagatcaatagattagccaaattattaaatgaaaatataaccgatataacatatcaagatgtttcgtctttagacaattctaattttacggtatcttcttctttaaaacaaacaacgataccatcaacggaagaatcacttactataaaacgcaacaccaattcaaaggatacatcaaacatgttgagaacactaggtgcattggctacacacgttttaaaaacaaatggagataatgaagaaacatctgccaatagaacattactattgcagcatagtaaagtagaagatgaaaataacacagagatagagatatcgtttcaaaacaataattataataaccatgtgaataatgataccagtgatcatgttatagaatgtagcaatattttagataaccacttaactacttccacttcaactcctaccacaaaattaaatcataatacgtatattgaaaataaaagaaatctattaaataaaaaaataagcatacctacagttcaaataaatgaatcaagaaaacatgatataccaaagttaatacctttacctaaaatgagtagtttccatacgataaatggctcaaccaataattaatataaaacataaatattcatctgctctagtttactattattatactcactcctcctgtttcttctttatcattacccactctttttatttattgtaacatatatagacctctattttattaataatgactgaatattatctttggataggaaaacataatacatagacataataatatatatacctgcataaatatctcagaaagagaataatattttcttatatttatatacttgttatttaagttattacatgtgtaaaagatatatttttctttttggttttatattgatatatagttctagaaaatatctagacctaactatagttccgaacagataataagaaaagttaaaaaagcggaggaactaagagccatattgagatagttaaaaaacaaacaataaaaaacataaatagataaaacaaaactatcgtttgacttttagcactttcacatttagttgttcaagtatgtagatgggtcaataccctcctccgggaattcagaaatcttaacatcaaaacgttcttgaattttactcaaaacttcttcatcagctggagaagaaacaaatgaaatggctaaacctttagtaccgaatctaccagctctaccaacacgatgtaaatattgatcagcttcagtggttaaatcatagttaattgccaaattaatacgttcaatgtcgatacccctaccaaagacatcggtagaaacacaaatacgtttctcaaaatccttgaaagctttataacgggcaatacgttcttcttgtttcatatgaccatggacagtgatagctgggaagttggaagcatttaataatttagtcaattcattagctctagcagtagatttaacaaaaataataacttggttaaattctaagtcatctaataattgagccaatttacgattcttttcacgctcttctaattttatataatattgttgtaaaccatgtaaagtcaatttagcttcatcatcaacaaagatttccaacggattttgtaagaaacgtctacagattggcctaatctcttgagataaagtggcagagaacatcataacttgcttatctcttggtgtggctctaaaaatatcctgaacatctcttctcatatccaattcttcaaggactttatcacattcatcaataacgaagtttttaacatgagataaatctatatatttgtctctaacaagggcctttaaacgacctggagtagcaacaacgatgtgtggagcggtatccttattctttaataattcggcatctttactaattggagtaccaccgtaaaaaacagctgtcttaacatctggcatatatttagaaaatctcaagtattcattacgaatttgatatgccaactctctagcattacaaatgacaactacagatacttcacctggaactgggtctaattgttgtaaggtagataaaacaaaaactgcagtcttacccaaaccagatttggcttgacacaagacgtcagtaccatggatagattgtggaatggtatgttgttggacttcagatggatgctcgaaaccacagtcaataatagctctagataattcaggctttaataaaaaatccttgaaaccagttgagtggatacctacatatgaacctttcttatcagcttcatttgtactagaagtttgttcttccccagtagtgccaacagcagcagacccttcaccactttctgcagcattgttggcatcaacttggatttcttgttcgttatcagagtattctaataaatcttcttcaccttcgtgggacattatgatattcagtatagtagattatgatatcctttcttttctttatacttaaatttgtttatttaatctatccaaggattttgtatgatatcctaatactgaataaaaaaaaattaaacaaaggataacgttccaaggatgtgtgaaagggcttagttaaacgtagctggtccagatagtacaaaaaagagtcactaaactagttccacacacaacaattcactatgctactcacctggcaatcagacaatgaaatagtgataatgcttgcgagccctacacagacttaatcgacgatccttcaattatgcattatgttgtttatcttataaacttttaattatttttcatgtttgtctgaatttttcaaaaaaaaaaaaaaaaaaaaagaaattaaaaaaaataatttcataaacatataagaagatcgtaagaaatgatgattgcatttcgagatctatgactaaacaggtaattaagaaaatgacacattaaattaccaatcattttgattgccattttacttttattgactgttctagaaattttcagcactatcattaatattaatattgatacttacatttattaaaatttattattaaaataaatatggcaatagaatgaactttaataaatattaacaatgtctttaattaaagatatgaaaagacgtaaaacaaataattacaagctgtactatctatactatccaattgaactgttttgttaagtttgactccattatatgtagtttatacacacacacacacatatatatatatatacataatagttctgattgtcaacaatatcattatttattaagaacaatttcgattcttctatgtcaataattattataaaaataaccttaacttaccaattgtgatagcaaactacatatagaaatgtgctaaagatgtattttccatcatagaaacatataaactaaatttacaatgccagtatcaatattgttctcaccaccacaaaagcttatatataattgtattaaatagtgaaaaaaaaatgcatgattatattttgactgtgtacttatttcaacgtggcagctgtcaaagactatggaagaaacgaaaagataataaaaaaggaaaaattattcatttgcaggaatgacagtacattaattttaattatgcattacataaaattaagggaataatatatcagattatattcgaatattgattgaattttatgtacagatagttaatcggccaaaatgaaacacaaaaaataatagaaaggaataaagcaataagatacaaaacacataattcaacatatttcaaaaaaaaaaaaaataacgtaaaaaagaaacagaaaaaaaacaactgcaacccattactcttctctaagaatcaatgaaaattatgagtacagatcgaaaagggaaatataaaagagtttgttctccatttttacaagcagatcttcttttattattattattattatcggtaattctttttgattgatttgttttctgtttcagacagaagagtctctaccaaagacggaagttctaatccaatcagcagtaacaaggactctatttcttaaggaaatacacatggataagtagacagatctccagaaccagaaaacaaaattaccacctgataacctgtatttggaaccagcaatacttaaatcgataatggctttgtcatcaccaatatatgccaaagtacccttatgatggtattggaaatcgactaggttggattcaatcttttcgatcttagtttttaacgattccttgtcaggacaacccggttgttccatcttccatttcaactgatcgatctcatgtaatttcttcaaatattttgccaaatattcaccttcttgatgagctacttgagcagtaggaacccaacctggatggaaagtacagtcaccaataccaaatacggaatcttcggcacctaacaatcttaacttgtcatcgatcaacaaaccacgtctatcggtttgtacatctaattttttcatgatatccatggtcagtttctgtggcttaataccagtagaccagattagcacaccatatggatattcgacttcttcacctttacaggatgcataaacagcatctggggtgacgcgtttaaccaaagtgtttaattttaggtcaacatcttcattaattaagaatttttgagtgtagtcgatcaatttcttatcaaacatgtttaagatatttggcaagccctcaattaaagaaactttgatatcttgggcaatttccggcatagtctttgtcaaatcttgtttgataaaatcttgcaactcagcgacaaattcgacaccagttggaccaccaccgacgaccaagaagtttagtaatttagctctctccggatcaccacggggtaaaaatgaggccttttcaatggtattcatgatcttagctctagctctttcagaatctgagacttctttcataaagatagcattttcggtaacacctgggatattgaatgtagtggaggtagcaccgatactcataaccagataatcatattttaaagtttttaaagtttgttcggctggacagcgtttattttggaagtcagaagatacaggtttgatagtcaaggtcttattagctagatcgacatcagtagcataggcttcataatagatgacctcacccttagaccttctagtgatggatctaataggttcaacgatagatttcaaattgacagtgccgactggggtagaaggtaacaatggtgtgaaaaggaagtagtttcttggggatactatgacaacgttatataaggaagtgtctaattcttgcaaaagagagacggcaccccaaccggtacctaaaataaccaaagtcttacggggagaaccatcagcaaaggttggggattgtggttcttgttcatttggatgcaattccttatataaactataggaaaaataactggcgatagtcaaagccgaatataaagcgaatcttgagacaaacttaccaaaggaacgtaatttagactttggttttgaaggggtagaagattgctgttgtaaaagaggaacaattctgtggaaatgtctattagtactagtatcagtatataaagttttgaaattagatgatgtgaatttggaagtattcttgatagttgaaagacaacgttgttgtttgacaatggaagagatcaaagttctttgtaaaacggaagattgactctttgaaacggaagtcattaaagataatgacctactacccatattcattactattttattttttttttcttttctttatctatattagagattattgtaatcgagctcagcttagtttaaaatcaaagtagtgcgatatatgcatcaactgtacttagtcaagtcacaaagccacagtatggtaaaccaaaagagaaaaaaaaaaaaagaataagaatattaagaatattcctttttttttttctctctttagaaagaaaagcaaagattactatatataaatacaaaggaaagcaaaccaaggacaagagaagtatttattagtttgagatataggaaagctttgattaagaaaaaaaagaaaaaagaacaaagaattaaagaaaacattgcctacttgaaaattgatagaaccttacaaggcaaatgcgttttttttttttattttttttattattttaatttattgtttttgttttcgttatctccagttgaaaatgtccgatgtttttgaatctgccaccagacactcataaacagattatataaacttcaattggaactttgaccaatagaaagtcacatataaaaatacaaaaaaaaaatacaaacaaacaaacaaacaaacaatatgatgtgatatgatattatgttatattatattatattatatatacaatatctagaaaatctgtttttacgtaaagcaaaatttcagatcaaataataaatagctagtagtaataataatagtaagtgaagaaatctgaatcatttagaatgataaactttggattcttctaaaaattataatgtttcttgttggtattttccttgcttctaccttcttttttattacctgcccagaagtaaaaaaataaaaaatcaaaaaaattaaaaaaattaaaaaaaaaaaaagactaattaattaaccctataatttctagaaagagatgtggaaattccttagggcaacgatacaacagttatcctaaaaaaaaaacaaaagcaagctgggacatgaaaaccctatataacaagaaagaaaaataatgaaaaaaaaataaaaaaaaaaaagaaaaaaagaaggagcaatttcctagaagaattccatccaatcaaatggactatataacgaaaaaaaaaaaagaaaaaaacaatttccatggagataagaattattttccgcttttcttctcatctcaactccctcctcccctctttttttctttttctttttctttttctttttcttttttttttttaattttattttattttattgtataaatctaaagggagcaacggttttaccggaacagcaaagagaacaccaagaaaaaattaaatagataaataaaaaaataaaaaaaatccagttttcctgtcgttatttacatatttatcttcatacattatgttcttctctttttcatttttttttccatgatctttggttttttagtagacgcagttaaaatgaaagatgttctaaattagggtatagtgaaataaagatatcaaccaacaaacgcaggtggaagagatgttcgttagaaagaaacttctaagattctcttgagttcaattgccttgatcttgcttgaaaaataaaaaaaacaatttctaatttttgggttgctcttagattttgacagtttaggcacttacaatttctttttgataattcacttttcctcatttgtggtagtgtaacacccaagagacgtttttaatcgtctattaaattgctcaaacatcaaggaaaaacaacattcagatagagtaggattgaatttatcgttatccctttcatcactaataaaatttgtgtctgtatccattaactccaaaatactaaaatttatcccatttgatctcaaattgtcgcgtatcagctctctacccttcgaaccaatcttggtactctctgtaccaaatatcaacaaaagttctttacttggccccacttcttttgttattctcgatagagtattatcattcattccaaacccaagagtcttcgaatctatatctgttggagaaaaacaggtggcacaacacacactctcattcaataatgatctaaacgctaaatggcctccaagacacatccctgtagcaccgatcccacgtccatcgaaattcgccatttcgtacaactttttacaacatatatcaatgtcttcgtcgtatgaatccaatggtttctgtatcttataatcgttaccatcctccttgccttggttattgaatggcaacggttcagaaccaacaaagttatggaacaatgaaggtgacatgactatatacccatttgaggcaatccttttggctaatctacgtactgtctctgttacttgatatatttcactaaataatattatacctgggaattgtgcccttggataattttcaataaatggagtccatatgaatatatgtaatgggttcttgccatatcttgtgatactatcaatttgttcttctctaaccaacattttgtttttcccttttctttctctctctctccaccatattattataaaatttgaatttaacaaaaaaaaaaaccttttacattctatcttttttttctccctcaaccttatataatatatatatatatatatatatattaaaatgggataagtttgattaagtagattccttttatgtggatcatgatgataacaacaattgaaataaggggagatagtgtagcaaaagacagcaacagcaataattattcccaaaaaaaaaaaaggttttgtggacattattttttatacatcatctcacaagtatattatttaaccattaaatattgacagatgctaaaatttcaataaagggatatctgattaaagatattctttttcccttatcttatcttatctttttatcttgctttacttaaataggcaattctagattgtgatccaaatcccttctttttccgtattttttttttttttagtttcatcaaattttcaatgtggtagtgcaaatataaagaagaaaaagaaaaagaaaaagatagatagttaatttcctatgcacacaacaatctataaagaacttatacttgtgtttttagtttttagttcataccaatgcacatgcttttttttttttattttttttttgtttctttgcgttatatttgaagatatattgtttgtagcaacgacatcaaaaaaaacttacattaacaatgacctctcatagatgtcttaggcatcactaaatctaatacacaatgtaagatactaatccacgacccaaaggttaaatattgtagatttcatgaatatcaagatccaactaaattgatttcctcctcagctaacatatcaaataaaaaagatggatatatttatatttatacatatagattattatatgactcattggttaatcacaaccagaaaactaagttaaattggttaaaagttgacaattcaatagtatcaaatggtaatgttagtaaattaaccctgtatgatcacagtaaagggtacattttatgcaaaattggaatgacgtccaaaaatgatgtacaaatacgattaaaagaatgggaatcccattgtcatcatcctgttactaacttaaccccagaaagagtgtcttttttaattcaaagatatacttctaacaatgctaattttaattctaacaacagcaacaacaaccgtaataacaataataataaatcgtttaaatttatctcattaagtaaattgtttcaacaactatcaatcaaggaaaattatcatcacaatcatcttcatgaaattccacaacttactacaaacaatttttctacttataaaaatggtggcttttatgtttgtaaaacaagtaaattatcattgaatgaaattgaatcatttttacatcaatacttttggaaaaaatacggtcgcggcataattcactgtctagggtgttcaacaaatagtaataaaaatagtaatacaagaaaacatattgaatggtttaatgtaccaattaaagaattgcctgatatgttatacacaatagataaatttactcatgtccaatcgtaaagaatccttcttgtttgctctacaatggattgtatatttattgaactagaaatattatattcgccattatatccgcgtttcaaacatttcatgatattgtcatttattgtatcactcaatacttgtcttgatattatttctggtgggagcaatattaaaagacattttccgccgatttccgaactcagtgagtcatgaaactggttgatagaattcccacaaattgattgatctatattattatataatttaacaaattcactactatcggaactgagttgatcacttattgacaaatttactatatatggtgactctgcatgtaatgtatatttcatagctttcatcggattgataatgcatttattgaaagtattttcgaaatttacaacatttaaaaacatattttcagattcgctttgtatatattgagttaaatttataaatatatcaaatataatcatctttgcgcgataattacgaaagttccttctatttaaatagtttattgagtcagtgaacccatttctatgatatagatcgcaatacacataatgaatatttgaattggaccatactttatgctgtatatcaaccttggatacattgagatagtaaacatgacattctggcgaatgacttaatatcatatcacataattgtaaattattatcgtttagtagatctccacccaacactaaaacatttcctgaaaaatttttagttaattcaaatcctaaatcacctttatctaagatccattgcattattgatgtagaatattttaaaaacataatcttttatattattgaaaccaattgatatattgccatgctgcctttgatttctcaaatgttacaatccttgtttaatatacatatttctaaattgtcttagataaatataacttgttattcccgtatttttgtgtcatctttgttttaattgaacattatatctgttgtttttcaattttctgtcaccaaattttgatcatgtgaaaaggaaaggaaacagaaaacatacgttaatcaggctgatgctttaattttttttgttttcacagcgacagaagctatattattcattctgatagagatattcaaccattcaccaaaatactacagatatataattagaaataacttcgtttagattaacttcttcttctatttcttcctattattgattcctttacttttcttcacttgataacattatcgagttaaaagatgtcaacaccagctgcagagcaaaagaaattattagaacagttaatgggtaaagaatcccaacagagtaaatatcatagcaatagttacaaaagccgatatcaaaataacagggaagatctaggtttgtacgaccccaaaatatgtaaagcatatctggtcggtgattgtccctatgacttgtttcaaggcacaaagcaaagtttaggtagatgtccacagctacatttggctagatataaactacaatatgaaaaggagaaaaaaaatggtaaaaagttccctgagtttgaaagagaatattttattattttatccaaaattattaacgaatgtaatggacagattaaaattgcgttaaagaaattagagcataccccagaagaaagagctaagattcaaagcattactaaggaaattgatgtcatcgacaagagaattggattaatgatgcaagaaataaatattctgataaaacataatcaagtgtctagagcaatgagacgatctgtagaattagaaaagttgcaagagagaagagttgtcatagccaaaaagattaaatttattacagaaaatataggtcaaagtgcacaacaaaaattacaagtatgtgaagtttgtggtgcgtatttatctagattagacacagatagaaggttagccgatcatttcttagggaaaatacatttaggatatgtcaagatgagggaacaatataaactatactctacaaaaaataacaaagaataaagagttagttatttagctatgtgtatctaaactctttctaaaaaagatagattctgattataaagaagatagaaggaactccttgacaccatattatccatatacaaatgataaaataactgatgtaccttttatacaactgacaaattaaatatcaaatatctaaaacgaaagtctgaaaaaagatatatattatgttggacactaaattgtgatactaatattaccagactcttgtatttttcaaattaaaagagaaaaactataaatgtcctgctctctttccatcaagtatcgaatacgatatgtgcaaaaatgatctaccttttgttaagtctactatattttaaaaaagtacaaagaagtttctttatttttttcccactcttatatataaatgttttttttactttgatttagacctcaatgtgcattttgtaaattcacaggtttatatgttaccacattatgacctcttatattatctttaatttcttcaaattcgtttatatttttattatatcgttcccgtattaaatcaccagtcaatgtgtgagttttgaatatgtcattatttcttactacagaaaatggataaaatttaataaagccagaaccatttggtgtagcatcgatttgaacatcttgatacttctttgataccactggtttaactcttttcatataatattcatctaaaacagcactaaataggattgtatcaactttattcctattctgatatttatttaaaatcaattgaaacaaatattggtttatcaaaatagcaaatagtgtagaaaatgatactggtgaaagacaaataaaaatcaaagaaatgggtgaaaaggtcatgaaaaggttggtgataaatttggtaggaacccatttcctaatctcataatagtaatctttatctgataatgaatcagttgaatttttggctctatattttctgttgaatattttaatgatgcaatttttgaccatactaagaggtgttattttgggtgaaaatttgttctcattatcaattaaagtctttaaaggtcttctaagaacatctggcgaattagtggatacttttggagtgtaaaatagggaataatatctataatgtcccaataaaaaataaatacttatgaatatgtttataatgacaatgaaaataagtaataagaaaaggaaataatcaaggcactttaaactattatagtaccaattattgttggatttatacttttctaatttaatataaaactgatttcctgacttatcactattattcatgttatagtcattgttaatactggagacctgtggtaatagattatatttccttaaagtgtctgacttggtaaaatcgaataatgtctctacagtataagtatcatatatattcatataattaggttttatcaaattgtcttgaagaaatcttacgatgaatgttaaaatagttaacccatggcccaatggttgtgccagtgtcctagccttcctatcccaatccaccaattccactttttcattataaaataacaacaaatcagatggagacatctttataagatgataaatccagttaaagtaattcatattatcaaaatcagtaaattcttcatcgttttccttgtctttttcaacattaattgtctttttttttgtaaatttaaagaacatctctcctacctacactttttctctctcttgcgatgaaatggttgacgtattatatactattatatattcatcttttatcgctttacatgcttctccaaatctttcaaaaaaagttaaaacatgccattaattggaatgctggagactaatagttgtgtctgtaatagactgatggataattgctgtctaatgttgtttgaaaagatttaatctcatgtttagcacatcgtgtaatttaccactttcggtaaaaactggggatttgatttctacaaaggtcaacaaactcttctctctaaccttgcagtttaagttgcctatagcacactcttctatctcttaatacattgattgtaacctgttcaaataaaaaacaataggtgattgaaagaagactttgtttcatgctgatacatttcaagtttaacttttaaaaatctcgtcacataaatacacacacacacacccatatatatatatatatatattatagaaataatatgactaaaattcaaaatagcatagctaaactacttggaaagaaacgagaagttatagaaagagtcctcaatgaagatgaagaagaatacaagtcattaccagaacaagaaagtttacattctattgaagaaatcatgaaagaaattgaaacagaaaccatacttgatcgtcaagaagtaattgaatcatgcatagaactgttaatgaaggagcctaaacttttgttgaaggattctcatttaaactacctttattttgcatttactacacagttccctccaaatttaatagctctggatgcatcacaaccctggatgctatattggattgccaattctctgaaagttttgtcacgagaatcattatctgaagattttcagagaagggttgctagaaaattgttggaaatatcaccagaaggtggtcctttcggtggtggtattggacaaattcctcatatagcaggtacctacgctgccatcaatgcactatcactatgtaataatattgaaggctgttgggacaagattaacagaaaagcaatctatgaatggttattaaagctaaaacaagctgatggtggatttaaaacatatttagaagttggtgaaagtgacacaagaggtgtatattgtgcattgagtgtagcctctatgctaaatgttttaacaccacagttatgtgatggtgtattagaatatcttattaattgtcaaacttatgaaggcggatttggtgcaacaccacaggtagatgaagcacatggcgggtacacattttgtgctgtagccagtctgatgatactaaaacaattagataagattaatgttgaagcattgatacagtggtgtagttctcgacagtgttttgaagagcgtggcttaaatgggaggtcgaataaattagttgatggatgttacagtttttggatcggtggtactgccgccatgatagaagcagccggttatggatgttgtattgatcaaaatgcattacatgaatacatatgtcaatgttgtcaaaatgaacaaggtggtggacttatcgataaacctggaaaaagccctgatttttatcatacaaattatgtgttactaggtttatccataagtgaaagtgaatattctttacaagaagacaatataacaaacaatatatcaactatcttaatcagatctaaacagaacaattccctatcttatcccttatctaatttgaattcaattaatcctgtatatggtattcctaatacagatttattgaattttgtaaaacatttcaatacacctttatagaagtttagtataatcctatattaatatgtatatgtagttactattttgattagttcaatcaaacaatgcatgtcgaaattacaatacataataaacaggcaaatatgtaaaaaatatgaatgtgtgtagaccattgaatcacctgtgtcatgctaatcatttcgttgtaatacattcatttacctactatgcattaagatgacattcttgtacttttttgaatttttctatctatgcaattgtagctaaaaagcaagaaaaaatatattcaacttgttcaagaaagcgataaaactaaataacatacaaggaatccagagtagtaaaaagaaggatgaagacacaaaatagtaagagaataatgttgagattcagaggatgaatagaagactcttattttgctgtttcaaagattaattgatacgttaaaacagacaagccatatcatatcgaagtatcattcttatcccctaatattaatacaaagatcattaaaagaaaataaggagagaatacttcttaatctatcactataagactgcttttaatactcatatttttttttgcagtatgaatatatttagattaaatagacaaagaggtgacgaagaagaacttttgaattcaatacctggtggttttcccacaataaacgtatctaattcaagtaacaataacaccactcagtcacaggatgttccacctgcaaataatagtacaacaagttttctaagaatagttttacaaattcctttgtacattctttattatttggttacgattatattgacgattctttcattgttgaaaccgattctaaattttaataaactttatgctcattgtcatagacaatattatgattataatacaaatatgaaagttttattagaccaaatttcaaatgaagatgttcataatgatttacatttaggatcatcaaattacacatttggctcagtatataattccgagacatctgtgattccagctcaattgatccaaaacagttacctagcgttattagagaattgctcatctgaatgtaaattcggtttaatatatctacataatccattactctgtgataagatgagttatgtgaagcatatcctttgttctccaagagttattaattgtattaaaagttatcagatgttactttggtttggtgatgtcactacatcggaagggttgcaagtatccaatgctttaaaggtacgtaaattcccttatttcggtatattgtctaggagaagtaatgaaactgcagagattatattcaattttaatggtcctattgaagagtttaatccacgagatttagagtctgtgcttgttcaaaaatatcctgatctattgcagatgattgaacaaagacaaaacatagaaagagatagactaatcaggcaacaacaagatgagagattcagacagtcacttttacatgatcaagcaagagaacgccaacgaaatgaggcacttcgtagagagcaagaacaaagagatcaagaattattaaagaggcagtggttattgtggagaaaaagtcaattacatccggaacctactagatcacaagcacaagatataagtagaatagccattaaaatgaataattttcataataatagttctagaatagtaagaaattttgatccaacattacctatcgaggaaatctatgcgtttgttgaattgacacaaaataatattatggagtcaggagatcgttatgaatatggagacaatccaccaaatggatatcaacatcaatataagtttaaactgatcatacctgttccaaggaaggaacttgttccatcaacactcattgggaatgagcctggaatatatccatcgggtaacattattgttgaatctatataaagaatcaattgatagtaaacaatataatacaaattttgtggatatcggaaatatattttttgttatatatatatatatatatatatatatatatatatatatgtttaaatgagaatacataataaagttaaatgtgcatttggaaaaatcatctaattgaaacgatcattattcattgcttttcttttatataaaaaaatcgacttattggccttttttaattttattcttgcttactgatttaccaactttctttttcttctttttgataagaccatccatattatttttagttactgcagagtaatttaaccaaaatttatcaaaactatccacaggtacaattgtagaacatttatgtttgttgagtttaacaccataagatattctaacaagtatattatatgtgttttgagagatagtatcatttactttaattcctgattcctttgaaatatcatacttaggtgattcatcggtattatattctggattgccatcaacaagatctggtttaatatatcttttcattgtaaaacgtacagcaattgctttcttattagcttctttaaaatattcttcagcttttttcaaaaaagcatcttgatcaatacaaccatcattagtcattatgtagatgtatgtatgtgtatatcaaaagagataatgagaaaaattcagaatattgaaatatgatatttttaaaccaaatttaatctgatcacttcgattccttaatcaaatttgattaagaaaactcagtttgactattttttggtaaaatgaaattattcaatactgttggtttaagtagtgatataaactatcattaataaagtgtcatcgttggttgcacttttgtcttctttagtctttatttttcagttcaagctatattttattttttttctctaccgcagaatttcaaaaaatttttctgctagcaactggtaaaattcaatcactttcatattaccaatgcatagatacttgtgaacacatgtaccaacgtatctttaatcgcttatggtctctatggttggagatttcaaacaatgatagaccaaatgatataatagatttgttttgaaacagttatataatcatatatagaaaaactatttaagaaaatacatttttttcaaagatggatctatgctatttcacaataatattcaaaattaataaacaataaaataaataagaaaaatcgcacctataatcaaagttaaactcaatagagattaaacaagtatcttgttatcatcagtgaccaatttatattaactatacatagataccatgatgattatagttcattcagtttattcatttattgtgctcttctttaaaatggcaccttcttccttaaccattctcttaacttcctctggatcaagtttatttccgtttgaatcaacaaacacagcttcactttctgcttcattaatcattttatctactatagaatcttggatcatttcagcttcagaagtaggagctggaaaaccgtaactgaaactggcaacatcgtcagtcttaactctttgagacttttgtgcttggtactgatctacacttaaggtgtatccattacaatcataatcccaactggataaccatttagaagcttcacaagagtcatgtgaccacattgaaccataagccaaagtcttacggttttggaagaaataaatgttgccgataacaaacaaggtaataactgcataagcagcttgtttgataatcttgttggatgggataacaaataatgcatcaaaaccatgacctaacgccagagcaccaaagtaataagcaggaagatattcatagataaaataattcccacccaaaagaatgtatggtgccatatagatagcataacctagtaaatattcaactgtttggatgtggaagtcgataatataagttgtttggaagataggtttaccagtttgccatgcaattaactcacatgcaaagccaagaccaaagattatgataaataaagtgactgcaaaccacatgattgcattaccaatgaaatagacattttcaaaattgtgataggctaattctacaccacgtgacataaatggccaggataatgggtttgaattataggaatttggaatatcttttttcttactgacgtagacaatatttttatgaatctcaacaaatttttgtaagaaggataatcttggatatgagaccctttcagtatcatctggcaagaagtcatggtcattactttcaatgtaccatagagttaaagctttgatcccttgagtagcacatgtaacttcttgttgattgtaactggaagctggtaaacgagtatcgtgagagaaaaggtagcaacctgtcatagcgtgtctcaatctaaatttagtattaatggctttaacggcctctctggcaccttctacagacttatccttgtcaatttcaatgatccaatcatcgttaccatcaccttcaaaaccttcgtaaccgtaacatgatacttccttttgccaatcactgttttcagagactggaggtttgtggtcatgtgaatgtaatctacaatgggttttatgattcaatctaatcttggtaccatcaaccagttcggtaaaattggtgattggtttacctgattcagaatataactcaaggtaccattcatttttaggatcttcgtatggatataaagtaatttcttgttgtttggaaccagcggtgtaaaagatatcatgagaatgcaaataaccaccatatgtgccagcatgacgaatagtaactctggaaccaagaccaacaggagctttaatgttttctgggatattattaccaatcaattcatatctgtattctgaggataaaatctctgcatccttactaatatgagtagttaattggaaatgagtgtaaaatgataacacgtaaacaaaagttggaataattaagcataataaaccttttatcgtagtatgttttatagatgaacagacaggtttagatagatcaccaatgtttaagatgaattttaaaactaaactgataccaacccagataataacaaaagcaccaacccatttagtagaaatagtgcagcctagggcaatggcagaaccaagcagagaaatgtacgatttgcaagatcccattgaatataactgagatcttttgaaaaggtagatagccaatgcaatgaagaaaagatatggagattcattaaagatgtaacgagaaattgtcacataaccattttcaaagaccaaagctaaagagattgcaaaggcaacaaaccttttaacaccagtgaggcgtaaagtggaatagaacaaaaccacagtcaataaacctaatatagaagaaaataatctaaaggtagcatatgggactttgtttggatatggataaccaactggttgaaaattgaattgaccatcaaatccattaaagaatgaaactaaaaagtagaacaaattggccattggtggggtagtcccaatgaaaaattcacgattaatataattagagatgataccaccaacaatgctttctttatcaatgacattatttggtgcagtcaggctgtgtgatctgacggcagaaccaactatcaccaaaacaataaggtataatttatcgaaaagagtattggaaatacgactatttacaaattcatctgttatcttgatacccaaataaggtctcacaggaccatttttaacttcaattggttccaaggaggtatcctctaccttcttattgactgattttttacccttcacagacattatcaatataattggatcagaaacctaacaaaaaaaaaaagaaaactgtgtgaaaggagcaaaaattttaactatgtcaataacttgttatattttgttttagtttgcgtttttatcaaatctttagctgatactaaacacatacaatcaataatattcataattgcattaatatttccctctctaaatcattattacaatggattccagtattctttataacatatatcgatatgaagatggacaaatgtaaataaacaaacaaaaaaaaattcttcgaggaaaagaaggaaaaaaaaattgcaatatttcgtgtaaagggataccctatttttgtaccgataagagacttctaaagagtgtgtagataataaaggtccaattgtagtaggaaagtatgtgtatacagaccatccccgattaacccaaccaatagtatataatactctattagctcaatacttcttttttttttaaataaaaatatacataatctataatcaattaattattttattgatattctttatgagagttttaaaagatgttacaatcataatcccaattaagtaaccatttcgatttcttacattcctttctagaccatgataatccataaattaatggtttataagtgttaaaaaaatagatacaaccaccagtaaaaatgattaatgctagcattcctactatctttgttcttctgttaaaatatgttactagcagattgaatccacaagctaatgccaagataccaaaataataagcaggtaagtaatggtgtaaaaacagttgtcttttcataaagaatgatggaacgaaatggatagtaaaacccaatagataatgaaaggtttgaaggttgaaattaataatatgtggatccttaaaaatgctagtggcacctaattgccatgaaaccaattccaccataaagattccaatggagaacaaggcaaataatgaaacagaccaccacatgatggcgttacctagtagatagacacgtctgtttccttcagaccagtaacttatacctcttgataagaaaggccatgaacttggataggaagaataaagatgagatgccactaaattcttgttaatgtgccacatcttttgatgagattcgatgaatttgcgccaaaaagatggtttttcataagatacccttggtgactttgattcgtcgaggttcatattctcgttatcttccacgtaccattgagtcaaatggaacttcccctgagtggcacaggtaacttcttgttggttgaacccccatgcaggtaagttgacttcgtgtgagaaaaggtagcaaccactgacaaaatgttttagtctaaaaatagtcttcaaagcaataaccctctgtttagcctcagggtctgttgttgcttgtttatctatttcgatgacccaggtatcgtttacatcaccatcgaatccatgtgccccgtagcaagacacttcagtctgccaatcactaaattccgagacaggagcagggaaatcgtgtgaatgcagtctacaatatgtcaaaggatgcaacaatctgatttgagtgccatccttcaaggattcgaagtttgggacagtaacaccggggtttgatgccaattcaataatccatttgttgttatcatccagatgtggatataaagtgatctgttgttgtttggaccctgtttctaagggatgaggatgcgagtgtagatagccacccatcgtgccgacgtgacgaatagtgaccacagatgatatgcctacgtctctcaagatgtttgctgggacattgctgttatgaagagtagatctgaaagcggaggaaaaaaatcctgcaccatcccctgcgttggtaagtgtatcaaaatgaatcttgaaagccatacaatagattatgaatggaacaactaacaaacagatgaatttagccaggatcagtttaataatcttgtttggttttaaagagagatctcctatagacagccatattctgcagattgacaatagacctacccaagcgagggtgaaaaggcctacccatttggaggaaatagctaaacccaatgcaatacctgtggataagagagccttgtaagatttgcaagtgtcaattggatagagttcgaatcttttataggaataaacggttaaagcgatgaaaaagatcagtggtgaatccagaaggatgtagcgagatatggtaacaaaggagttttctaatacaaaagagacagtgatcaacagacagacgaatatagagacaccagaatattttagggtcatatacattagaaggacagttagggaacctaggatggcagaaaacaatctcattgggacataaggagtatttgaagggtatttttcaccaatcgactcaaattggaaactcccatcaaacccacaaagatatgagattgcagcaaataccattttaattagtggaggatgtacatccatgaaaaagattcccttaatgtacttagaagcaaaaccaccgaagtgaacttcatcaaagacgacagaatctggatattgtaagttatataatctgacaaccgcggtaaataagatgagaaataaaacagtcaatcgttccttaaaggttcttattgatctcagtttctctagtctgttgtttggttgagagactaggtagcttcttctgggaccatttttaaattcaaggtttgaaacagggtcattctcacatgtgctgttgatatcattttgagcaatattattatcctggggtactgtagtattcattcttttattattattattattattattattactattactattattattgccttcttcttccttctgtgccccagttgtagactttgtagaatgttgttacagttttatttttttctcacctgtgttgtaaatatctatatatataaacagatataaatgcaaacaaaaaaatatgagttatacagatataaggcatatctttaccaaggtaatattgtataatatcatgttatattatatgtatatataaactgttatttcaaactttgtacaagctagtggttcctatacacaacacgcatacatacatagaaaatttgaccagtgtccattcgaactcatcgagcccagtcgtttagtacgggcaaaaaagaaataaaaaataaaacaaacgacaaacaacaaacgacgacgtcaaaacacccatgcaccagaccacgtgactcttccttaaaaaaaaagaaataataaaaaaagagaaacagtcccctttttccccctacacacacccacacacccacaccacaatatatataccgtaatatacaatatatagtatgatataatacatattgtaaaatgtattttaaacagcgacacagatgtaaagacgggaagagttttagagagcagaagggactattgggttgaggggacgagggaaagagggatgagaagggtattatcaaaaacataagcaatacactaacaaagcattgcattacagtatgtgttgttgcagaaggaggggatgactttgtgatggctttgtgtgagatttgtgcatgtaaggattgtggagtgaagttaagggaggagggaatcatatatagggatatttatatacacacatatatatatgtgtgtgtgtatgtagatatgtacatgggtgcaggtgaatatgcctggatacagtattctttttgcatatgtatggggaggataaatatatatctatatatcttggtagtatattatataagcaggattttttttttgtcaaagttttcagatattggctggtcccattgtaggtcgtatttgtgtttgtgtttgtgtttacctgttttattgtcttcttaatatttctttcttcttctctctccctgctttccccagatgtctagtgattcgaaagatactattagaacattgatttctaggttcaattataaaagagtgcttaattcaaatccacaattcaaagtcatctctttacttggcacaatcgatggtaaaaatgcaattttgacagtagaaaagacccattttatgttcgaagaaaacattcaactacaacaacaaaaaccatcgatttatagcaacagaaacaataaaagcactagagatagtaaagaagcatctcaccatcctcattcccatccacatccctatgctcatgcctcgctcttcaatcaattaaaagcagaatcaccgcccccattatattatcattgtaaaaatgaatattcttgcgtacaaggtctacaagatattaaacaaattacttcaaatgacgtctattattggggcgttggtattatcaaacaagatctaaacaaaagtccaactgcaagaatcaaccttatttggcccgccaattatattcacataaaaagattcgatcaacagaatttgcattttgtaatcgaaactcccgccacatacatgcaggtagtcaagccttatatcgatgaacaagtaaacgataaccagagtctcaagtggatctataggatcttgtacgagggttctgataacgatagagttttatataaagaagatgaagatagggaaagaggttttttgattttgcctgatacaagatgggacggcgtcaacattgaaactttataccttgttgcattggtctatagagacgatatccgatctttaagagacttgaaacctgttcatagagaatggttgatcgaattgaataaaaaaattagatccattgtccctgcttgctacaattttatggtccgctccgatgaattgaggatctttatccattatcaaccttcatattatcatttccatctccatattattaatactaggtatcctgcaggtaatgaaggtctaactgttgggaaggctgtccttctggaagacgcaattgaagcgttaacatattcaggccctgatgggtatatggaaaggacaatatcgtattcaattagcgaaaaccatgatctttggaaaagaggtttggagtctgcaaatcaacaacagtttgataatatggggattcctagaacacctgagattggaaattaagccatttcttgcgttctccttttaacaaaaatatataaagaaaaaaagaataaatttaaaaatacatttttattatatacattctatacttcatatacatatatatgtgtgtgtgtatgtgtgtatgtatggtttacctgcttgggtgatacaaagtatgtactttgtttgtttctctatctttcatttatctcttgctatgtcttcatatgcatgtacacacacacatatatatatatttttttttaatttttttttattatttcactgttatatgtaaataagcataatactaataagagcacaagtactagtattaataagaaatagcatgtctagtataaggaagtagtctattcaaccatacccatataaaatatcagaattaatttaggactaaacattttcaactgctttttaagaaaaataaataaaaaataaaagaactatgacgacagaatttgtccaaggacatgctaaatcctcatcaatagtctcaatagcagatgttaataatatttattcaaagaaaacttcaaactatttgaatataacatcaaaatacggtgattcaagagacaacataaaagatatcgaactttataagaatatatgctcctatgaaaacactttaaatagtctcgtggaatctgtagataaatataaacctgatatacaactagctaaggaactcatagctgtcgaccgaaatctgtttcaatcgttgggcgaattcaacaagttcgatcaaattgatacaaaattgacacaattaaatgaggaaagtcaggagatcgatttgaaaataaaaaacatcttagacactttaaatgaatgtcatgatcaattgaatagcatgccaacattgcaacaggttgaatttgagatgaatgctatcttagaacagagacagaggatcaattcaagggatttattggagtatgctacaaaattgtctaagtttaccaaagctccaccgacttttgataaaggttctattggaccaaacaattttatttggcctgcagaggatgctttaaggagaggtatgttagctatggctaatttatattcaaatgaattgactaaaatatctacagataataatgataatagtgcaataacaaattctaatactatttcaaataatgatgctgcgcaaggactaaggcagagtggagatgaatttagtacagaaaatcatgaaaaaagggaaagaaggtcgtctttcgtttttggtgcacatgttaatagtgagaatgaaaaggacaatgaaaatgaaaacgctgaagatgcgatggatctcgatttagatttatttagtccagatgaactttgaagattagtactatatgatatctaattattatattgcgcttgatgtgcattatcatggtaaaaatctgtatatgtgtatatatatacatagataaatataaacataacttaaagatacatatatacatataaaagatgtttattcatataatgcattatacactaattatatctttcgaattattctctgtatgctacataaaaaagagagagggagcgtaggcttcttacttaaatctcattattctttggaaggcaagtattcactaaaacttgttcttctctttaaattatcagtttgaatctctcttttaaaatcttcgaaagctttcattaaattttcttcttcaatctcaagaccgcgttcttgcctccattcgttatacgactttgtgaactcgtcccattccttctttgcattttcaatttcatcaaaattaatagttggaataccaagattcatttcatcattctcgggttttagttgttttctttgcctttcttcttcttccttttcatatttcaacttttctttcaaaatgtcacccaagacagaagctttggtagtaatatctttctctagttctttctgttttatcaatgcaatctccttaggttgttttagtttacaccattgaattacttgtttagaatatggtcccttgaataagaaaaatgacaaggctataattatatgtccatagaaataaactgacgaccatgcttgcattgaacctttgaagtccaatactaaaaatggttgaactaaatagccaaaagctaatttaatgacatatatacatagaagatcgtatatccacttataggataatggagtttttccatcttctgcaaggaaaataggtcttagattgcgtctataaaatttgccacatgtttggtataatgcaccggtagcaaaagtcaaataataaccaggattgatcccatgccagaatgcacttgtaatgaatgtaaacaatgtagctctaaaaccaggcttgtgaccctttttggtgacacgtaaatacacataatattttaaccatttatttgtattcatattccaactttctagggcttgtcttgtactttgtgccatttctacattccaaatatctatattttgaacacgattccatttaatttttttggtcgccggatcatacccattataacctaatccacatagaatacatgcaccttcagatatagtccatgctgcatagtatttaaatctggctattaatccaaggaaatacatgtaatgaattctatatataaagcttcttgacatgaattgttccttgtttaacatatactcaatattacaaaattgtggtaaataacttcttaatgctaaccaaattaaaccttgaataactttccatgaagctaatctcccattctttggaatctgcctttgttggccagggttgataatcttacttacaggtttctttgaatgaggtagatccttaaacatttcacaatttaaccatgattggaaatcgcaataatcaaaactaggacctgttaatagagttgggtaaaaaaacacatatgccataaaatttaataaggatgggtgtctttgtaaagctttttgtttttgatattcagtcaaattattttcaaattcatttttgcttaaaagagagccatcatagtaggaccatgcaaaagaagttaatttcataaccataaccatttgtgcagctgtgatatctattgaacttgctgcctcaatggcagaagagtcagtaaaatattgggcatagatatggtttagtgctaaatgacccataacaaagatgaaatttaagtatggcataaatttagatttgtagaatctcgttattaaataagtgaatatagaactaatgaaaagtgttctgaaaccagtggctagattcatgacaccaaaaagataaattgcagatataaataggatgaaatagcatttcaaatcaattcttttatctggtaatcttttcaagatggcatttaatgggaaagatccaagtagacaaatagcatatcttaatgtgaaactatcgattccataaagttcagtaagtttattaatgccatcgttaatcggattaaacattttttttatccttgatggtaaagttttgttctattcttcttcctactctaataaaaacaaaacaataatagagcagtggttcaattgcaagaaattattgtaattagattgggattcttgattgaacttatatagagaggaagatgatggaatagagccgaggaaaggtaaccttcagtttggattagaattttgttcaccaggaataacctatagaattgtgtttatatatatgtatatatatgaatagctaattactctgttgaataattgagaattctcaaatagataaagctcggaattctaataaattgttgaatttttttaattttgttctcctttcttatcatcacgatattggtgtctgcgtataattttccttgggatcatctatcttaagcttgcttgactaacgtgcacgatctttggaataattagggttctacttgtttctttttttctattttttttttccaaaaagtctaaatcaaaaaatatgtccttttctaaaaaacatcagtcagtatttttttttaatatattgtatggtgattaaataataaaaataaaaaagtcattttattgaaccttttactcatgttagatatacacactaccaattaatagtaaataaataatcactgggtcggatattttgatcaatgaaaaaaaaatcttacaaaaaattttatttcagttgtttttgatcacaaaagaaaaacgaaaaagagagacatttctcaattttttcaggatgtggatttctaaaaaaacgccacttcttttcaaagatattcataacatggcacaaatgggggttatactattttgaaatctttttcctgccattagctgtttttttattagggcattttattatttttctctctttctcttctgttttcttaagtaaatttctattgttttatcgtttatttttttttgtgtctttcttttctttttgttttgttttgatttttattttttattattaatcaaagaaaattataatgccacgaattactaaggaaaccccagtatttttttagtataggcatatatattcatatatatatatataaggtatagttgcttgtttgacgtcaaaatatcatattgaacattttttggtctagcttctttgtctcttttggctatcatagcttcttccattaaatgatcgatggttagttaattaactcatgatattttggtcctaatttactcggtttgcgatttttataggggagcagtatatcaataaataattcaatattgtgtgtaaaggttaaggatgaatctgttagtagcaagcaatatgaaactattgtttcaaagacaatgtttaagttcacagtttaacatatcttcggtaactataaaaactttttcgaaatatttttctagtaattcaatcgttaaaaacaagtcaccaaccgggattgtattcatgaatatgggtggtccatccactgttgaagaaacacatgattttttatatgaattatttgcagataatgatttgattccaatatctcagaagtaccaacctatgtttgctaaatggatatccaagtttagaacgccaaaaattgaaaaacagtatattgaaattggtggtggttcacccattcgtcgttggtcagaatatcaggcctcggaggtatgtaaaattttggatgaaattaatcctgagactgctccacacaaaccatatgttgccttccgttatgccaagcctttaacagagactacataccagcaaatgttgaaagatggcgttaaaagagcagttgcgttcactcagtatcctcaattctcatattctacaacaggttcgtcaattaatgaattatggagacaggtgaagaaattagatcctaatagacaaattcaatggtctctaatagatagatggccaaccaatactgggttaatcaatgcctttgtcgaaaatattaacaggaagttaatggaatttccagaagaagttagagataaagttattttattattttctgcacattcattaccgatggatgtagtgaatactggtgattcatatccagctgaagtagcagcctctgtttataagataatggaatccttgaattttaaaaacccatatagattatgctggcaatcacaagttggccctaaaccatggctcggtgctcaaactgctaagatttctgaatttttgggtcccgaatgtgatggtttactttttgtcccaattgcttttacttcagatcacatcgaaactctacatgaaattgatttaggtcttattaaagaatctccatatgctcataaatttaaaagatgcagttcattgaatgggaacaagacatttattaagggtatggctgatttggtcaaagagcatttaaatggaaaattaaattattccaaacaacttcctcttgattttattttagggaagtctaatgatcctgtcaaagatttagatgagttatttaatgcaaagagatcctgaatttttcatggaaaaaataagaaaaatagttgaaaatacggttatttgaacctgtatcataggatgtatcgttctgtttgggtttttcttgtgattaattgctaatcattttgttcattgtatcaattgatttttctttgctacatcttatttatgaccatatattattaaacagcttattatttattagaaaagggcattaaataaaaaaaacaaaaaaagagtaagcttagtaagtgaaaatgttactgtatataatttttgcttattcttaatgataaataattgtatggatgaatgtttctattcttggatgtctcattgtttgaagatacaaatagtggcgtatcagtgtcattctgtgtttttatttttgttttacataactaagtttttctatatgaagaactttgacctacagggggtttgaacttaagagtggaaaaatgatagtccgttgtaaaaaagaaaaaattggtataaatttaaaagatagatgtatgtataacattataagggaaaagattgggtaagaaataatgttctatgttttgttcaataatttatagctatttgaaataagggttttgtggaaaacactccaaaacaatcaatataggttaactttaacctatagatcaagttaaaatgataaattaacgtaatcactaagttgatctatgaagattctatagtgtgattacagaagaatattttggtggtaaatatctcatttgcatatctttgaatatattgtccgatattgtgtaaaagcaacaatttgtagattgcaattgtctttttggatcacaacctttaaaaggggacagcactatcaatgatgatggtgatgatgtaagagaatcctcaaattccaggagaagctaattatatatgaataaataaaagcagcatatactagcacaggtagagatattaggtaaatatataatatataggacaatactcaaggaagtatgtagtttatagctcgaacaattgattatagttaatttaaaaaagggggggacttttgctaacagtagaaatactgtatattaaagtaaaacaaaaggtattatgatagcaataaaaataatgtatattggatgtgatttattaagttaggaagtttagatcagaaaataattgggtatatgttgcctaaaaatagtttatgttcttttctctattattttatgctgattaatgtgtctttttctgctttttctacataatgtgacaattaataaacatattgttttttttttctttcttttgtaataactaatgattttagttaataccaattaatttattatgcgtaaattttttgatagttcaaactaaaaatggttttgttgggataaaatattttaaaaataaattgattgaatatagagaatttctctatatctcgatatccatgatctattaggactataagaaataaaaaggataaattagatttacttatgagagtattcactaagtaaatgagaaaattggcgttttaactcttaaaaattaatatatttatgttgagaatgagcgcctttatttattggatatatagtaaacattctcaatattatagtaaacagatttagtatacaaaattataataaagttcttcactttctttctctatatacaacatagaaataataatatacaaagattgtaaataagataaaaataatgtatgatgaaatccttggctttatatgtgttaacattcagccattttcctctacgaacagtaagatatttaataaacaaactcaacaacctttggtgacctctcaacaattattactcaacaatttatcgtttagtgtctactaaaatcttattgttctatctatttcattagagaacattttatttcaacaatttaacaacaatattgactagaaatgaaaatataaaatgtatgaattcattattttttgaatattttaattatattttttttgttatattttatttttttaacaattgaagaatctatctgtttaaaaatacactcaggtattttacaacagataatattttaatttagtatagacaaataatgtaatcattatttgacaaaaatgttattctcatttgcatttcaagaaactttttttcaatattttatgattctttaaaccaaataataagtagaaatattatattcaaatgattcataaaaatttgacgtcagaaaattatcattttctaataatatatattaataaatatcatgagacactggtaaacttttacttttaacttcaaaaaatacaattaattcataaccatacttgttatacaatggaatcggtaaaattacttgaacatggaaaggcgttctcttgattgttagagaatcaattaataaattatttagattatgtgatataaactgatgatcaatacagcaatatgctattacttaatatttttagtaatgttattaataattttattcatattattttgcttcaggttgtttttgtcttacatgaatttcaaagagtataagatagacactaaattggaacacaatcttttttagtgttaggtctttatataaatatctttcaaagtcatttgacttagttattattaagctattttggtattttatatagaaactgtaactaacaacctaatattgcatattttcttaatatagggctcataacacaaatttaacaatagttttcttataggtaatcaacttatttctttctatattttgttgtcaaataagaagccatcaccatcggcattacgtgagatcctagataaatctagaattatccattatggttatgtacaccgtgttcatatatctttgttactgcgccacaataacctattgtcctgaatgttctatgaggttcaattatattattataactaatagtaaagatatggattactaatcctttaatataccaagttgaatagttgatcgaacttcagaaaacatataaaaggacagcgttttttgaagataaagaaccatctttcataaccttttcttgtagataatttatatattatatatatatataaatagaactacaagccaagtaacttcgaacaaatatataagcccaataaaagccgctcaatatataagaccgttttagtaattatgttagcgactatatttgatcattgtcttgattattttaatacctgttgatgttatttgtgtttccccgaaatatacaaagaaactaattatataatattctggcacttaatgttgtagtatggtatggtgaaattctttgtgtattccaggaaagcgcaaataatattaatagtcattcaagtaatcgagacagtaatcaattataggcgataatataattactaaaacggtcttatatattgagcggcttatatcgagctaatatatttattcaaagttatttaacttgttacttgcttgttattctatttttgttcatctataatatataaattatttacaagaaaagttatggaagatgatcttttatcttcagaaaacgttgtccttttatacgttctctggagctcgatcgattattcagattagtacattaatgacttgactgattcaccctaaaatttattacattaatttaggtgcactagtggattagaactgcaccccaattctctaatcatggtgattagtaatacacgtgggacttattaaaacaataggtaaattctagatttgccaaaatcttatgtaatccaatctctttattatgcagcatctaatgttgtagcacgtgtatggcttattaaaacaataaatagttctaaattcattcaggaacttatgtaatcttgatggttataactattctattccacaaaacttaacggaaatcgctggttctatagtgtagtggtcatcactttcggttttgatccgaacaaccccggttcgaatccgggtaggaccttttttacatttttgtattgttatatcgtatgatatgatgtataaagtatgattacaggtatttccaaattctttccttaaactgtaatagatgaaaacccgattacgagagatatactcttgtagacgctaaaatagatagatatagcttgatttgttgtctatatatgacatataaactgtactctacatgaagagtaaactaatatacacgggtgtacagatacacataattatataaacaagataaacaggaaaaacaagaacgtcgtcgtcgaccaaggagtccacaagattgtttatggtgacatctggatttcatatgtcacataaactatataccgtatgtattggtaagatataatggagttttggggaactacctcaagaaagaatctatagcttccaaagtaaatgaataagaaattgaaaatatttactacttggcgttggcattaggcccatctattttaatcaacaataatcatgtcacaatacatattaaagatagtctagttctcatcttttttacttgatatataagtagtcaattatttcagaaataagcatgtatatatatgtggattattatatagatatttttctcaataatgaactttttacgtgctatatagtattgagagaataagaaaatggtgttattaaaatacagcgtactgctttgtttgtataagagaagtttatttataaagagacatggtgttttgggatgttaattcacgaccgaatcagttcaataatattctacctttgatttgtgagatttgttttaatgatctcttaataattaaactaggaatatatatatgtatttcgtacaaaaggacatatgaaaacttaattaattatttttttctcaaaaatgtttaatttatagtacaaaatacgagcttaatgtataatgtaggaagaatgaatagaactgaagtctagaagaagcagagaggttatatgtcaagttcattaaacaagattcgctgaaatattttagaatgttgaaaaagatcaatattgaataagtttggagaattagcagttggaactataatttgatcgatgaatatcctatatttctaatgattcagccatggataaacttgaataattttaaagagcgacctataaggagagacatttaaaattattgttgaaagtatatattgccatttttttttcgttaaatcgattagatacaaaaaataataattattactaagtaataattattttaaattagcaaaagataaggtttatgttccttaaaaaagtaataaattaaagagtatccttgtgaaaacttaaaatttttgcaaaattttatttacaggttttgtttaattttttttgtacacaatagtccccttgtatgtatctaaaaagaaccttaatagcttaaatatatacacgaagggtgagaagcatttatgaataaatgttaatattgatattaaacaaataaagaaaatgtaactgtaagaaaaatatttgttttctaaaatctatctctaccatgttctatcaattattgaatcctcttattatgatcaaagttaatggttctaatatatatatatactgtactcttttaagaaaaaataaaatagtgatctgtttgataaccatcacaaaacatgttaaaataaaaaaaattctatactgtattatacacgaatatatataaaaaaagaattttatataagataaaacaaaaaaagaaggacaaatcaatttttttcattggctgttttcttaaaatattccttggaatcctcaactgttggcttgatagtagcggaacctggagtccagttacatggtaaaactgtaccattcttatcaacccattggaaaccttcaacaattcttaaggcttcttcgacatttctaccaactggcaaatcatttattgtgatatgtctgacaacacccttaccatcaattacaaataatcccctcaaagcgacaccttcttcttcaatcaaaacaccgtagtctctagaaagggtgtgattagtgtccgcaattaatggaatatcgattggtcctaaaccaccattagcttgatctaaattggtccatgctaacagagtaaattcagaatcagtagaagcaaataaaacttccgcaccaatatctctaaatcttttagcggcctttgaaaatgcaataatttcagttggacaaacaaaagtgaaggccattggaacaaaagctaaaacgacatatttacctttgtattgttctaaggagacttcttcaaagacaccgtcaatgacagcggtcttcttgaaagctggagcaactttttgaacttgagcaaccattgttaaattgttatttgttttattgttgagtagtatttttttatgaagatacgtattatagtatattactgttgattattttggttttttatatgtccttgattctaataggggaaaaagcatattgcaatggatcgaaattttgtttaaggttatttatatatcaaataattttgccaattaccaggatttttaatttttcattattgtagttatctgggttggagtccaggttggagtctagaccagctaaataatattaataagtctcgtaaaatataactgaagcaaaatttttatctaaacgtgcattatgcactactgagttccagagtgggaatattattataaatcggattggtcatcataggggtattcttaggagaagataatacacctagaaaaagtatttttggcattacacgccttttttattgttgcttattaagaaaaaatagctatatttacccacttagtaacgctttctagatgttctagaacggtgctgagtaatagaaaaaaatttttgagggatttttaccgttttccggttatttagtcttaaaagtaggattaaaaaaacaaaaaaataaaaaatagaattatgcttgacaaaaccctaggttttaaaaaattgatataagaaaatgatttcttttttctgatgtttttactaatagtaactctatactaacttgtatactaggtggtatatttgttaaaaatctaaaaagttaagtatattattaaatgtcgtaaaaatctctattgttgtataactttctgtgtagtcttggtagttataaaactttatttttgcccttatttaattctaatcaacacctttaaaactctatctttcaaaagttaataaaatagtattacctattaaagaatatacaaattacaaaaatgaaacaattcatgtgaactcgatctaatactgctcaacattttgagttagaataaaatgcttggtaattttatttatgccaaattctcattattataatgtacattagaatgcaatccttatcaaaaattattttttttaaagtgtaaataaaatcttctgatagaatatataataaaatgaccaaaactatagaatattttccaccagtcagttaattaatgctacaatgtttgataattttagaaagggataaaagcataagtatcgttgtatatgtttttagattaccgagaatttaaacgttcagtcaatccttaaggaatgtgtttttatcatagttaaattgtcattaccatttttgtctatgtgctacttttgaatgtatctgtttacactcctttatctttatctcaaattggtgagaatgttatgacttttcccatattcagtaaaaaatgtacgtcgtctaaaaatatttgccgtatccattgtttcctgccccacattcttgctgaatcaaaaattaaaaaaaaaaatcagaggtttgtctaaactccgagaacatgtaaatttacagaaataaaaaaagaatctttacagcataacagactataaaaagtttgtaggactgaaagcttagaagcatggcttataatttgtcgttagtaggacattttctatacattattgaaaaaaaggaaattggaaattgaacatttcttttttctctgtcttagtattacataaagaaaactttggaattttactacttttttaagtgagactaaaatatgattaaaatatctatgtatttagttatgtatatatttctgtataaatttgaaagatatatgattaatatttatgatatgagaaaggaaaaatgcagaaaaagattgtggcttacacatattgaaaattaatatgaatacattagcaaaataaaaaaaattcgatctatttttaggaataaaagaaagaaaaattatgagcaaattagcaaaataaaaaagaagaaaatttagccagtgatttaaataaacacttgaagtatgattaatgcttgaataataatattataatttgtaaaaattcctctataacaggagataaactagcataagatagtttagtattttaatgatccttgtttaaattttgtgatacaaaataaagtgttgtaggcaaaaggatagaagaagaaaagaataccagattctttctcgtttataaatataaggtggacccaggcgatgaagatggacttaactctgaaaagcttgatatcggatctttatctgggggtggtgatgtataaaaacaataagattgtagtaatttttgataatccacgtttttaaaagaattgctttgtatcatagagttagaattattatttgaatgaaaaatacattgattagttttatcggtagctaaattacaattttttgaattgttcatcatttgatcaatgtttatattatcattgatctttgtgttattattactattgaatatggttgagggatttttaaaagttgtatctgttccaacactttgtacttcatcttgttgattcagtatatgtttagaattcaatgaggtagaaggaactgtcaagttattgttaaagtattctatggttggatgttgaatatcaaaaaaatctttcatactatcacttattaaagatgaactagatgataatccgctattttgtcttgatatgaaattagatggaggattcatataattaatggaacaatttgcttcgtttttactcaaattggtagaattcagttcaataatactattatttgcattaatggttgtactactatttggcataaagctatttttatctaaagacacagatacatgtggaatagatacagaatcagatgatagtgtagaagatgttaacgatgaatttttcttcttagcagtcaaattgtcatcttggaatgaagaaaaagatatcgatgaatttgtagatgatagagatgaattagaaaatgttctatcttctaatggatgtgttaaatgcggtgtagtgtctttttgtttgtctttttcttgagaccctctagattgattcttatcattaatttctgatgttgtaacagtattagattgtttatttaaaggatctaacaaatctatatggatttttttcattgcaatagaagggcctggcagtgtatctggcagtggtaatggattagtctcaatgtttaagacctcatttattgttgctggtttctttacaaattcacaagtatcattatgatagagatgttttaatggtgatgtattgtaataatctgtatcttcactaaatgttctcgaatggcccatatatctattattcatgaattgtctagatgtcattggaacaatatatttgttattgactaaaaatggatgattgtattggtggttgtttgtagtggtattagcagtagtagttaaagacttattaatgccagcacttacccccttatcactactattattttgaatgtttctattagtgtcatttaatgtatttatttttggattatggatataagaattgatataatcattgctgtttttttgtaatgagtttaatgtcagtgttaaaggtgctacgttattatctgtaggatattgttgagaatccatatattgtgaagatgaagtagaggatgatgataaacctgacggtaatgatgatgctgtatctgaaaatggcaaactttcgacacgatgactattagtaaaatcagcatcctcttttgtctttttatcggtgtcatcatccactttaattagttttaaagtgtaattttgataattattgttatcgaaataagtttcattaccaacatcatatctacagcataaatcaattttaatatgtttatttagcaaatctttaatttgtaagaaaaatttataacaattcaaatcaatggtgaattggaattcgtcgaattttgaagtcaaagatcttctgtaagttgaattaatataatgaatattattccaattattgaaagtgaatttaatttcaataattttttcaaagttgatattattaactattaggtaaccatataatctattttcttttacatctgactgttccaatctatatagtttaatattttgaccatttaaataggattctatcgattgatcattctgaagatctaaatactgagatattattggaacattagaatcaattaatttccatttgatatcgacatcggatataagcaattcatttgaatacattaagggttcattacccgccattttgttcttgatattagtattagtatctgtatctgtatctgtggcattatcactgttataacctaagaggctgttataattactattgatagttgaatttaaataagcagaacgaatattatctaaattgtttatagttatatcatcaccgttgtcttcaccctcataaccataaccatagttatatgcataatcttcattgtcatcataatctaaatcaaaatcagataaactcaaatcgttttgtttataaaaactcttcgatccggtgttaagttgtttattattagtatgagaagggttggaggaagacgaggaaattgatttattttttttataaagataatagaattttttatcgaaattaatcaaattcggtaaaatatctagattattaaaccaacatggctcgttcttaatattattctggaaagacttcgaggataaataacgattattataagaataattatcattttgattgtatatacccctactattgttatcgtcaatattaggggacataattggagacataattggagaactttcatttgatatagtgataggttcatcatctgaatcaaatcgttttatagttgtagaaaatagatcaaatctaacatttttagaaatgggtttttgagaagaagaagaagaagcagaagagattgatgatgatgatggtaaagatttatttgattttatacctgacttatgttttaaaatagattttatcatttcaataatattctagtttattgagtacaatatcaaaaaaaaaaagacaaaagatgaagaagaagaagaagaagaagataaagaagacaagcaaagtacaacaaagtaaactaaaatataatgaactatagataaatagatatagaaaatttctttgtttatattttttgtattttaatgagttctatttttatttatttatttatttgtttgtttgttttttttgggaggggggggaaggttctttataatttaaaatattattgcttgttgtgatatctataaaaagggctagtagtatataggtatgacagagaagacagaggaaagtaaagaagtaaaagaaataaaaacactaaagaaaaaaaaaaaaaaaaaaaaaaaagaagaaaaagagagagagagaaaaagaaaatgttatggatagatatgtaatgtttgttatagcacttggttataatcctttcacttgaatggaaaaagaagaagtgttgcaacagaaggtagcaagaagaaaaagacatcatacaaaccaaatgtagagagccagagacaagcgttccatatagagggaaatagagatttatattaggggaaaaaaaagtacaaacaagacatcgaaaagatcgattctctccttatttttctttttggttttttttggtttgtttggttttttaccgttttttttttttttttttttttgttttgatatatcccaaatcgaagaaactgaaaagggggtggaaaagtttgttttgttttttttgttgcagcatctagaaacttatttttttttccttttctggttttctatttttatgtaatcaattactattacaaatctcggtaaaaaagacaaaagaaaacaattgcacggggaaaaaagcatagaataacagcacaaacaaaaaaacaaagaacaaagaaatctgttcggggtgtgggtgttgcgtggaggagggggaggaaaggaagagaaaggagggaggaatacaaaaataaagaacaaaaaaaacaaaatttcgtaacttccatactctcatcctggaatttgagggttctcttacatcatcaccatcatcattgatagtgctgtccccttttaaaggttgtgatccaaaaagacaattgcaatctacaaattgttgcttttacacaatatcggacaatatattcaaagatatgcaaatgagatatttaccaccaaaatattcttctgtaatcacactatagaatcttcatagatcaacttagtggttacgttaatttatcattttaacttgatctataggttaaagttaacctatattgattgttttggagtgttttccacaaaacccttatttcaaatagctataaattattgaacaaaacatagaacattatttcttacccaacctttttcgtatcaacattatattaagtgtatatatttttatttttcaaaaaaaaaaaataggcgaaagattttgaatattcttggaatttcaaagatatatttcaatattagatgattggaatagagtgaaaactccttagtgtcaatgtctttattttgaaaattcaatcagtgatataagcttttgcttgaaaagtgctattgattggcaacttatttacgtttgtaatcgcaaatggtattatgaaagactttacttttctaataatatacgttatctatattcatatagttataatactaataccttaaatcgtaatgtttactaatctgtcttttatatgcttgtatgtagttgacttctattttcatttgtaaatatactccaaccaaaagaagtaatttggtcacatggataagattaatatggcaccttggtatagcagatacatacatacatatatatatatagtatcttttatgaaagttatattttcctaacataacggttcttttaaatcttttccaatacttagtaatgattcaatcctaccacgtaatgggttactattacatttaacaaccttcatcttattaaaatcaatctgtgcgtttatacgatctaatgtaatcaatccattgtttggtattccttccatactactgaaacttgatccaaattgttctttaaataatgcaattattggatctacattcttaaaatctaatctttcgtattccccttttataaaacttttttgttcctcattattattattattagcagtattttgatccattgatattataactaagataacactctctatcacaagatcaatcatattggctaggtcttttctttcattattatttgtatccctattagtatcatctatatttgtttcaagacatttatatattttaactatattatctttaatattataaattatttcaatcgtatcccatatgtaaaaattatacttatatacctctgtatctttgtctttatcctcattgcttcttcccccttcttctataactttcttatttgataccattggtattgatgtaccaacatttccatatgtaaactccaatatatcttggaactcattaaggttacaatataatggtatcgatgcataaagtgtcttattcatggtactgttattattattacaatgatatgtttatatatttatatcgatatctatatttatgtgtgtatatgcagaaaaatctataacaataaagtgacgataattttctgttttttttttttttgttgcaacaaatctaacgtgttatcaatcagttcttagataaaataaaaatatgaccaagcaaagttcagtgtcttatctaatacgtatgtatagatatatatatatatagatatatatctagatcctgctagtgtttttctaagaatataaatattatattttttcatcgttatcttcccttatgtcttttgtatcattggacacgaaatgtatctttttctctagatctttctagtcattacgtatgatatttagaaaatgatagtgatttagttatttatgcaaacatacatacatacatacatatatatatatatatgtatcacgttaaaaattcataatcatcattaactgtccagaaatcttctactggtgcaaaattatcaggaaatcgagtctttgtaacaaatttatttgctattttattttgggaattcttgagattattattataactatctgacgagatagtaccaatacgctttggtaccatcattccattattactttggttaacatctacatgattaatcatcctattatttggctcattggttcgaattggttgattattctcattagaacacccatcagcatcctgggggtgcaatattgaattattgttattactgttattattattattattggtagtagcagtattagtaacagtagatgttggagtgaggtttacactattacttgaaccaatatgtgaagtcacattgttatttgtggagaaatgagtcatattcttcttgtcactatctgttggtattggatttgttggctctaaattaaacatactataattataattagaatggcttaataattcattagctgaatcattggtccatgtagatatattattaatcatgtcatgtgtgccattattgaaaagaacaccactggaagtgacttcattgttccttgttattgtcataacattattgttattaggaatattattattattactcatactgataagtggcattgtgctgactgggatcgtactaaaagtattgttgctgttattgttattatttaccattggtccatgaataacaggggcacctggataacttgtatttcccattctagtcctgttaatattggttgattgataaatttcggatacgggttgtattggaacatcattaaatgtggagatgggtacatgagtattggtagaagtagtagaactaggagtgtcattactgttatgacttttatgagagttcatatttttaacataattttgttgtatatttgttggttgagaattcgttgaatttaaattagctggcagagtgggttgtgtaccaatatatggctgtagatttgaatatggaataatcccattgccattatttgttgtagtatttacatttacatttgccggaaactgtttattgttattattatcagtcttattatagtttaacgacgttaaatatacttgtaaattttgttgtgcataatgttgttgtaaaaatgcttggtgttcaaaattttcccaattaaattcatttaaattaacaggtttcttgacaatatatctctttgtatcatcattaatactagttgttggacttgatccatcttcttcttcttctttcagcgagttggatggtgtgtcagcagttgattttttgcaactttctgtttctgttctattgaagcttttttcatcttcattatcttcgttaattaataaatgagctaaacttttagggagagtagccttttgtaaaattcctttctttctattcagttccttctgttcagcaggatcgacttgagaatttgccacaaaaccggcatgctcttcggcttgacctttcccaaatgttctgttcatagctggtggcattccattaatggagttggtcgtttcataatttgagttttctttactaatattgttattattggatgctttatcgttgatccttccatcttggtcactactcattagtgtagtatcctcgtccgtaatattttgtgttttcttcttttgataactattagaagctttatgttgcccattcttagtatcattagccatgtatattaactcagatgaattaggaccacatctttcaattaaatttcctacagttgcattcatcaattgctcaaatgcgtctctaaaaattctagcaaaattagatcgttctgtgatgacataaaggcaaacagaacaagcccttaaatcatccattgtagaaaatagagtggcactaactaaaggtctggtatgtttagagtcatcacctaattttcttctctttttatcaccaaaattcctagctagccacatacaataaattaatgtgacaccggctacgaacactgtatgcacggcaggtgttgaatgtcctgtaacagtcttttgatggaatattttatataactggcaaatttggccagcagcagcttgacattctctaaataatctgtcatcggggggcaagacttcaaggtatggttgaattaataatctaactgctctgtaataatataattttagtgtttcattttcaaaatttttgaaactactagtgattagaccagacctccatacctctaggtctttaaaaatttttcttacttctggcaattgtttaattagtaattttttattattgctgttattaggcgtactatcagcatcttcaggtttttgtggaatgatttttaactgttctacaaaattggattcagtacgacgcaattttaatgattgattaatgaaatttactccattgtgagtctttgtatccttggtattaaaggagtcttcagtaaaataaggtaaatcaatttcagattcagtgattgtgtatggtttcccaactgcaacacaaatcattctttctaataaataaatacaccaaaataatctcaattttttgttagcaaacggatctggtgaatgccatttattcaagtataatttttctttacaaattgtcatcacatctttaatgatttcatataacactaaagaatctttatctgttcttaatagatatagaactaataaagtcaataattcaacttgttgaacataatttaaactcctaccacattttgccacatgtcttattgcagtcgaaaagtaattcatcggtggatttcccttatatttgccagtagtcatctgaagacatgcacttattgtgtagacaagccacattctaccacaagaaaaatggaaatccgattctgaataagagtaaatattattattaacaaaatgttcgtggaatgagtaaatctcttgctcatctaataaggggtatttgaattgtaatctagtgaaaaatgtgtctagaaatgatcttgataattcctcatcaaattccattacaggtttataagctaaaaactcttttaaatcatatttcgaaaaaatacaactgctaagatcaaaatccttcaaagatttagaagtcaatgaaataacagtgtcatatttgctgttttgagaagcaactctaggaagtgaggttcccatcattcggttataataatcgtctttgaattcagtcctatttgctgaggtagcagatatgctatttgtattgttattaggatcaaagaattgggaatttaatggaggaagtattttagtattatgattattatatggaaacctataatatgtagagtcaaacttattatctgggccattatttggatggtggaaatccaattcatcaaatgtatcatccatattattcaacagatgagtaattcttttatactgttttatcttcttcttgaatgtcacggtattcggtgagatatcaattaatttttctaaaaatcttagttttttctctaacaattttgtgtattcatccttatcagaatcagaatttgggttactcttcgttatctttcctgtagtgttgaaatttgtagtttgtattatattagaattagagtttacaaagaatgagttattaccattattaatattattgattgatagtagtccattagaatttagtgaatttttagaattaactggagaaatcgaatagttactaataatcagaggtctgtcattccccaaagtgcagttattaatattacaattgttgtcgttattgagaccgacattattggtggtaggaataatattatcttttgaatttgttgaagaactttgatatttggctggttggatacatttgacaccagcttttaaacatgcagtacatgtaggtaacttatgatcacaacgttgctttcttcgtctacacagtaaacaggaacgagacctgccctttttatctcgtagtaaaatatcagttctgttaccagctaattctacttctctttgaaattgttcaaatttctcctcacttatttctttctttggtctacccataattaaaaatagaagaaaaagtgtcaatccaaatatgtgtatttgtgtacaactaaatagaaaataaaattattagtctaagtggaaaatattaaaaaaaaaaaaatagaaagtaggataaatgtattgtaattatttatgcaacgatctgttttctgtatttctgttagttttatttgtaaaaagtaaaaaggaacagtacagagtatggcgaaactgaagtgtatacgaaataattattaaattacacaaatatgcaatattatagtgcaagtgaataagagaaaacaccggaaaataagcaatcgaacaaacaaattaataatcacttggatgtaagataaatacataaaagtaaataaaatatttcttctttatgttttgggtgtttctgatctttattatataacacaaaatcactggaaaaaataaaaagaaggtatgagtatcttcgttttgctgattatttaatttagccgaacaatcaatcgttcgacctttttaatctaaactttttttttacataacttccttgaaaatcaatcgaaggtttagaaaaacaggaaaaagagaaaatctttatgacgcaaaggaaatttttttttttgtcacaaagccgtaggaaaagaaaaaggaaaagagcaggggacaaaaaaacgacagtggaaaactaaaccggaagaattaaaccggaaaggaaagcacttgattaaaaaaaaaaaaaaaaaaaaaacaaaagaaatttctcgaagacaacttaatttttatgacagcgaataaaggggaaaaaatgtctcccgttatacaatagattacgtaatagatgtatatgttcttagggatagttactagttaatgtgatgtagtctaaaagaatagtaaaagatactctacattaattgactggtagttgaacttaaagtttgaagtttatgtgttcacaatttatgtctacgttgcttgtttgaaagctgttcaaatcttgaaattggttcatcagacaaccataaaggtaaggtattaataatttcttctgttattgcttttttcaatctttgtttcattttgtatatcactcttcttttcatttcggttatggcttctggatttagatcattttctatgatattttttattatatcatttttacagcgtttattaaattgatctgttgcgtccaaatcgttattcttgtctattttattttcataatcgtctctgtaatgatattctttccagatcataccaaaatttttcatttgattataccttattggaagcgaaaagattaaatgttcatttgctatatttatgcttaatttattatataacataatagaacttccagcttccgccacaaaccctagtgaactgaaaggaaataataaataaggtttcctctcttccccttgttcttctgatcctataggtaagtgcacgttaataagatcacataataacaccaaacaagcacttaatccaatggctggtccattcaaattacaaatgatcggtttgttatgagaactaaaagtgtttaacatatgaatagttggagtagagacattaccaatatattgtctaattctattcatttgatttgtgttatcaatatttttaagttccattactgattcaaacttgccaccactactaaatattctattgccactactttgcaaaactgttatatagaggtcattatccaaatttaatttgtttaaatattcccctatttgaataaaatcttcaaaggataatgaatttaaatgatttggatcgtttaatgttattgtaccaatatgatttttatgatcaatatccaatttaattgtttcagacatgacttgtactaatgtcactggtatatgtcctgtttacgtgtatatatttagagagggaatatgtaaactatactagaatttattcaataacgtataagaatcaaccctaagaaaaatggatgttatgatagaagtaacaagtataataattacaggaaaaaaaaagaatcgaaacttattattatatattcatataaaactgtttgcataatttttttgcttgtttaaaaagtcctgtagaaatagactattagaaaaaagtacaatttttcattgtcatttttttttaacttttacctatcgtccccaatggcctgtaagactaaaagaatatcagtcgtgtttaatttacttctcccttattcttttctattatatcgtgttattcttttatgcaattgtcttttagacaaagaacatagactatattgtatatctcataattaactgtctggaggggaaaagggaagaggatgcgattttaggtgtatgcttttaccaaacttgtatcatagaaaaggggattagtagggttaagcaaatttttttatatatattctagccttgaaaagtaatcaagggtcataagccaatattttttttagggattacgtactgattttttttatgataagttactgaataatggaagaaatatgggctactactaagttacattatgagtgtattgtctgtatttgaaaagatttaagtcagcataaaattttctgaaactatcacaggaaataagcatattacaacttgtgatacataagcattgataacccctttatttatccaatattatccaaaaaaaaaaaattcaattaagctctgatactattaagattgacggaaatcatttgattattgatatatatcttggtggaaggaggtataatattccaaatattacattatttccataaaaagttgtaaaaattcgaatataatcgtacacatttctctacatgtaattttattttatttttttttgactatcaccagtaatgtctgagaaatgatattaaatatttagatctttaaaatactttgcaaaattagggctgataaaattccccttccccttatgttggtgaagttcttaagtttttatatcctgtctaaaaccttttagctagaaattagggctaggaataaaataagtaattctttcgaaaataaatttatcttctggaattctttttgtagttgcttctagatcttattcctgagaagaaaatcctcagtttcatttattgatcaaatagtataatatcttaggtctcttaaaacaatagccctaaaatgaagtcctcatcacttttcacggctttgattttttgagaaagacgtcaaacgaaaagatagtctttttttccccatttccatccagtatttcctaatgtagaaataaataaaaacggtttatcattttctctttttattgcaagtattctgtaaatgaaaataaaaaaagaagaaaaggaaaaaaaaagtgtttaaagatataatggagtgatatctgcatatcattgtcctaatagtctcaagcaacaacaattgaaccgaagagattatagtactatctctaattagatcagaaataaataacagaacttttttttttttttcaaaagagaaattgaattaatttgtaagtgtgcataatttaatcacatactagaaaaatatggggttactaaactcacaagataaagaaattattaagagagcactacctaaaaattcaaataagattattgatgtcaccatagcacggttatatattgcatatccagataagacacaatggcaatatacaggtttatctggagccattactttggttgatgatttagtgggtcataccttttttcttaaattgattgatatctttggacatagagggatcatttgggatcaagaactgtatataaatttccaatactatcaggatagaactttttttcatactttcgaaattgaagattgctatgtggggcttttgtttgttgatattaaagaagcagaacattttttgaaaagggtacaaaagagagaaaaatatgcctcgagagcaactttacagaataaaaaagcgattgcgttaaataaaaaattgagggctgagaatgcaaaaaaacagcctaaacaaggccctagaggtgaaactatggttgtaatggattctcaaaggaaaagatataattacaatgaagttgaacacattccagtaaccaaaaacaaagctccacctccaccacctccatcctcatcatcaatattttcacacaatgatattgatactaatgagggtgatacagaccagtataatgatggattcgatgaagatgcatattacaatgacactgatgtacaatcatcaactttgtcggtgcagcctgctgtgtcagggcattccactgtagcagataccgtgtcttctacagaacaaaaagaacaagcatcagagttgcccactcatcagaaagttaaacataatgtgcccccattacctgcaaattttcaaccagcacctccgttgagtaataatactactactactattccagttcctagtactactaatgtttcacagctacagccttcatctttctcaaatcaaccgttcaataatgcaacacaacaagcaaataactcattcccatttccaattccacagatgaacaatacaaatatgaatttgcataggccagttccgcagttgccaaatagaacgccaagtattaatatgaatataaatagtaatataaatacagcaaggccagttcccgctcctccaccaagacaaaatattaataccggtggagttcctcctcttcctcctgtaagacgtggtccggctccaccattaccaccacacagaaataacaataatatgaataatcaaagaatatctagtaataatggcgtgcccccacctccacctgtaaggcgtgggcctgctccacctccacctcctgctagaacaaggacacaaccaacaattctacaacctaaaacttcttttggacaggataccttcacacaacaatataatcaacaaatgccacaagttacttttggtcaatcagcaccattgtcacaacaaacagaaataccacctcatactacgtttaatacggctccgcagtctccagtacaaccagtaccatcttttagaccattaaatagttcgtctaatatgaattataataacaataacactgctgctatagctcatccaattcctccaataatgaataataataataatacaaacttggttcatattgctcctcctgctcctccattaatgagtaataatactaatgtgaatgctccagtagctccacctccgccacctatgatgaatagtaatagtatgaccactcctcctgctccacctccacctccagtgatgaataatagcgaagctccggttgctcctccaccacctgttcttgctacagacaataacaacagtggatttgtggaatctacaggtgatgcgggtagagatgcactattggcatcgattaggggtgctggtggtattaaatcgttaagaaaagtagataaatcccaattagatagaccatctgtattgttacaagaagctcgtggtgagactgtggctacttcaaacacaggaaatgaaacggcttcttccaatatgggtgctggtggtccaccatctctagcagatgcgttagctgcagctttaaataaacgtaagaataaagttggtgtacatgaggatgatgatgtaggggatgattggtaaagaattataaacgttagaagatagtgttaaaaatataacagtaattgttgcagagttggtggtttttgtcacagttatttatgtatatatgtatgaatgaaactcttgttgtttggatattggaatattcattttattagtagaaacttaaataaacatgacttatctttatgaaatctttggacattaatttgtaaatattcaatacttttttccaattctctctttaagttattaatataactttttttttttcgttgatagttgggcaaaattaaacggtattaaatggtggatatttggaatggtatttgataactccttttaaaaatagatagatagataagttattgaactttatatataaggtgtacatactattagttgtgatggtttttgtagatatggtatttcataagttaaacaaatgtgctaatatctggaatcaagttttttgttcttaagcttctctattgcccacaagatggtaatatttttaactttcttgaaacagaaaaatattaaatatagatatttgtatacagtacaatacatacttacaaagcaaaataagattcgttataaacgagtaattattgatagtaatgtgaataatctctctgtgaatggcaaagaaaataatgtaaaagaaaaaaacatgtaattagtaatcccttcttttttgtaaagacgaaggatctaaactctaaaatatatattagtgtagtatcatagacattgttggtaaattagtaatgtttatcatccgttttgttgtatttcttttacattgtaaacaatattttgttcaatatttttttctttcgtgcatgaaatgacaagaaatataaaaattttgttacaaaaagctaaaattacaaagtgcggagtgcttttgcactacaaaatttgataacgtctataattatgcagttaagtaatatgcatattaattcaacttgcaatctgaatatatatataaaaaaaaaagtttttacaaagaatacaaacaagaaaaaatcaaccaattctttcttatcgaattaatataatgtaaatttattagtagccaatattatatatgcaatcaacaaaaacaaaccatcaccatttacataatgattttaatgaatctttatttgatgtttaaactgtttactgttaatactctcaataaaagtggattttattttattgttgaaatagtacataaacttgactgtaacacttgatttcattttctatataaagtaagagtactataccataacaaaattttatttttttgaacttaacagaacaatatttttattcatcaattttttaagctaaaactttaaatacatactcttgcaatagttttcaaagaaaaaaaatataacaatatcattctagcgttgtaaaatttttttccaactttctatttcaatttaattaatttctttcatttaataatatatatatttatcactttctctttaaaaatttataaaatggtaagcaccaccaaaaaagcaagatttccaacattttttatacaaaaatatttgtaatcacttcaactgaattaattattttataaaacgaaacttcttcaaaacaaaaaaaattattgtttcattaaacaataatatctataagttgtgtttagatctacataacaatcattggtgagaaatctaaagagattcaataataaaaaaatctatatcaataaaaaaaattactgacttagcacctgactcgaaaaacttctcttttgtttgattagaagtaaacattcaaattttttatcataattattaattttcttttgatataacataatgtttccacaatatatttaagctgactggtttactctttatccatctcttgttctttaacatacaaaaagagaagattacaaatcggatactatataatattagtagttatagtagataataattaaatacctaacattcagtgataaataaacagtttcatcataagaataaagctaacgtggacttatgtttacacttatttcctgataatcgataaatgaaaaacgtttcaaattaactctagtgacaaccaatatttgtaggataaatgttaacatgcaaataaattcttttagtattacttttaaaatgctcatttaatacagaatcgtcatgccaatttcaattttgactccttctaccttttgattttaccactttcactaacgaatgctgttcaatcatagatgttttgactcggatttcaagctgtttttttataaaaaaaaaaaaatgaaaaattttactttaataagagacaaagccagaaaagtaataaccccctgaaaaaatttagggactaaaaattacaattttaaaaaataaaagtaaaggcgacacgagcacgaaaaagatcgggtaggaaataatattttgtattttcccaaagattatagatttttaaaataagggttttaaaaaaactctcggaaccattaacctacatagcgcagtattcattcatatatagttcagactaaaataataataactctacttttgatgttcttatttttttgtttttttttataaaatccagtagtattgaacatttaagaaatacattcaagaaacaaagcattctaaccaaaattaaatgtttatgtagaattccatagatcacactgttttttgatcatgttaaagtagttagggttcggttaaagaaaaagaaattccttacaagacggtagggttataacaaaagttttgaaaagtttttccttagggataacttatttttacaagaccttttaggcgaaaaaaattttataaaggatggaatcaatattaacgtgggatccccagactttagtaagaagtgaagtgagaataatcttttaaatatacatctcttaagagatagagcatggaaccgagtcaaatcattgtagaattctaagaattataattaaacctatattaaatttttttaactaagtaactgaaacagtgagatctgagaaaaacatgaaaaatattttgtaaaaaaaatattaaccctaattaattgtctttctagtttttcttcccaaatatggatatagtgaggtatatttctctcaaaccctaatatatcttgaccacacctgataaaatgcactcacatttacaaacagattgaatcatagcaacatcattgaaaccatccagtgtctccgccctccaaaaaaaaacactaaaaagaaagaaatccataatgaggagaaaattttgtgtgatcgcaatgacacagtgtgtatgtacgaaaatgtgggaatgagtaatgcgtgatgtatgacttaactttgaaggaattgaaatagaagtaaaaaattcatgcctggaaagaaaatataaaagaggtgatgatatcttcttctttttagagctcgactgcttattaatttacatgcaaacactttgctaacaagagtctcttgtgtgtatttacctatctaactgtacataacagaacaccaacgtaacaaaagttatagacaaaagtatatctgtttaagatagcaattgattttaattttaattttaatttttcttcttttagttctaattaatactatcaagtggaataatgtctttagatagaaatgaaccaagtcattttggtgcaggtcctgcacaattgccaacccatgtgttacagcaagctgctttagacctaatcaattacaaaaatctcggtttgggtattggtgaaatttcccaccgttcaaaggatgccactcaagtcattgaaaattcaaaagctcacttaaaggaattattaaatattcctgatacccatgaagtctttttcatgcaaggtggtggtaccactggtttctcttcaatagccaccaatctggagacagcttttgtcggtaaaaataacagagtaggaaaatgtgggtatttagtaacaggttcttggtcacaaaaagcatatgaagaggctgctagactaagattaccagcagaaaaaatctttgattcgagagattttaacgacgagggaaaatttggttcaattccagacgaatctaaatgggtcaataatttgaaagaagacgatgattacgcatacgtttatctttgtgaaaatgaaactgttcatggtgtggaatggccaaaattacctgaatgtattgtgaataatccaaatattgaattagtggctgatttatcaagtaatattttatctcgtgagatcgatatttcccagtatggtgttattatggctggtgcacaaaaaaatattgggatagctgggttgactctatacattattaaaaaatctatcctagaaaacattaaagctgctaaagaagaaaaattagtagaattaaacgtccctgtgacaccaattgcatttgattatccaactgtggttaagaacaattctgcatacaataccattccaatatttacactacatataatggatttggtgttccaacatttgaaagaaaaaggtgggatcgcacaacaggaaaaggaaaataagatcaaatcaaagacattgtacgaagcattagatttatatccagatttttataatttaccagtggatccaaaagttagatccaaaatgaatgttgtgtttacattaaaggacagttcattagacgagaaattcttgaaagaggctgcagctcaaggattgactggacttaaaggtcatcgctcagtgggtggtttcagagcttctatttacaacgcattaactgtggaaagtgtaaccaaattaagtaagtttatcaaagactttgctgaagccaacaagaactgagaaaaaaaaagtgaaagattggcaagaaacacgacaaaaactagaatatgatactcatatctacctactcaaatgaacttatcagtatatgtatgacaataatttaaataacgtaatatgtatgacactctaattacaaataaaatatcattagattaaaaatatatacaagagtaaatattataatcgatattctcgtactcaaagaggtcacaatcaactgctctcaccccataaaacaacaatatattagctatatgattgatttatccagctcaagatcgaaagataaagaaatgtgaacaaccaaccgagcgaggaaaaggggtgttatttttgtttatttgtctatttacaaacaagagaagataagacaagaactgttctaaacatatattaacgaagagggaagtccattctgaatagaccaaccttaaaaccgcaaatgtatgtagtataatttacgatacgctgtatattaatttaggtttaaatatcatggaagcggaaaacttggaaaaacacacacaaaaaaaagaaacaatcacaaaatcagcattaccctcaaattcattctaaaaaacatttaggtatttttgtgttcttcactcatcatatgtatcagaaaaatcaaactaatagaatatcatttattacatcaaatttaacaagtttatgttttattattgttatcagcaaatagatatacattctgacagcaagtcgacattttatattatttaaaagaatatatataaatataagtctaaatataaatatatggaatctaagtaacaggatactatagaagtagtatattatcacatactacactacattcatattatttcgattgaaataaacaacctaaaaggaaaaaaaaaaagagagagggagggccacttggtagtctttcttctctttaatgggtatgaacaggattttcttcttgaatatcttcaataaccaaccaatcttcttccaattcttgctcattttgtgtttgtccaggatctgattcatttgcgacagacacttttgatgtaatatactcctgtaatagagcgtcttcattaccttcaacctttgggacaacgggtctagagggagtctgccattctagaacattgccctttggagatacaattttggatatatctaggccatttttgacagaagtcaattctttaagatataggtcttgtattaaatttgaagctctcgaagtattagagaataatctaacagaattcttggatagtatccttgttgtagtgattcctaacattgttgaagcaaagctattattccgtttatttttttattttgatttatgtattgactctaattaaaacaaagacagagttacttattatataagctacttgataatttatttattgttcttttctattttttttatctcctattttcaccaaaaacaagaaatacttgattaagaacaacactacaaacaaccaacctcttttgattccttttctagaattggtgagtttattatcccacgttcacctgtgttatcccgatatcaagtggatactgtgctgtagcccaattcttttttatttttatatctatttttcaacttctacaatcttttggggaccttgaagaaacaaagagggaaaaacgaaaaaaaaacagaaaaacagtgagaaggcgaccaactttctccgcctccgcggagatcaaagaaccaatcagctttgcggacgtttcaaagaaagaattgttaatgtctttgaagctgcagaaagttaactatggattccctccaaaaaaaattaaaaaaaagaaaaaaggtgtgtgagtgtatgggtgtgctaataaaaaaaaatttcacaagatttacggactttttcccgtttttgctcaaattgaatgatccatttaacaccaccaacaacttctcatccttcctatctctcctccccctcaaaaaaaaaaataaacaaacaaacttgaaattctaaactagcacagttcaatcacataaaaacacgaatcagatacgacaatcgaaggagaagcctttctttggtattattttatattccgtactattccgaaactaagtcatcataatcccgcaacctgttttttttatatttttttttctgtcacaaagtacagtaacatcttttgatgatcgtaaaaagcatgcgctttatactggaatccagaatacttcgtttcttttacgtttttagtttcagaattttaatgagacttaaaagtaacatttcgtacaagtactaaatgtcttgactctatatctctgtagactttcaaacaaattcatacatacatatacataagtaatatacaaccttctagtaaaataaaaaaatcaagatataaccacagtaatatagaagaacactcaacatccttactatatcactagagaaattggttaaattttttactgtatttttaactcggtattttgacttttcttaaccaataaaaccaaactttgtgacgcatttgtatccttactatatataccttgtgcctcatatccaaatgtgaagtcatctaaatatgatatatatgctctgactttctttcttttttttttttatgattgaaccaagattggaaaagcggcggctttcctgaaaataatctagggcctgagaaattacaatttaagcaaaaagaagtatatataacaccgacacaaaaaacaatcaggtgaaaaacaatattctgtgtttttctcaggactcaaattttcaaagtgagggttttatgaaaaaaaaaaccatcttgaaatcatttatttacgttatagggatattcttacacagcccatacaaaatattataataactgtactataggtaccctcatttttatttttctttatataattttgtaaatagattccttacaacaataagttgaaaaaatatagcattctattcatcatgttttcaacattaaattataggacaaattctgtatgtaatcacaaaagaatagttagttgtaaattccccatttatctaaatatgtgtatatattcagtactatgcacaactaacaatttatagattataattttttttattcttttttttttagattactgtctttagggttgaggtaaaaaaaaaaaactgttctttcctcataagtcggtaggattataataaaaatttgcaaaaaacttttctttaagggtacatcttgtcactaaactttttgggcaaaaaaaatttaaggggataccgccgctgatggtgatgtgattctcgaaggaaaattgaaaccgattaggtaacaattgcggtttttttttaatgggagatcttacataataatttaacagtgggataataaaaagattatattacttataaattaaacaatagaaatgttagtctccttttacatcatctctgttcctaaaagatatcattcgtgtgaatacacacgtaagtatataatgcaaagctatcaatatgtatggatcttaagttgaatatatatatatacatacaaacatgtaacagatattttcctttttgatctcttgattagttttactaactgccgtagatcccaatctgaaagtaatataacacgcacacacacgaaaacacaaaaacaaacacatacctacatatatatagatatattttatagaactcaataacctataaagtggaaaggaaataataaattaataaatgattggttttataaaagatttagcaacttcattagatgatctataccattatctaatatatctggttgaaaatgatggtaaatcaagttcaactggagaatggggcataagatgtaatgaaatgtttaatataacacaggggagatgtgaaatcaattatatagacagatcacaaaacataccaagcatatctgtctccaacaaaaataataatcaaattttacaaaataatgttactgatgcagatgtattatttggatttgttacggttgtatttgtttggtttattattgctatcatcattatattgtgcactataataatatcattaataatcacaaacataaattctagttataaaaatgacgaaaaaaacaataatatacagacgactacaaactatgatttagaaaagcaatcactagatacaatacccgaaaccaagtaaacaagagggcaataaagcaaaagatcaaaaaaaaacgaacaaacaaaaaataaaaacaaataaccataacaacaatggtttaataataacagactcaaagaatctaatcattcatttttgccattctggaagtgtatggagatcatacacaaacattaaattatttagcaatatttatatcgctttactcttcctgtttattcagaaaagtctaattgtttcagctattttctacaagccggtatatatatatatatataactcacgttgataatgaattgagtattcctcatctttttgaaattgtataccttctatcattatcacaatcacacacatattaatataatatatcaatcatcatattgtgtcttctcttttcttcacaggaatagtggacagaaaggcaaggttcatagattccgccatctaaaatcttattttcaagttctagctgtattccgcgtttttatctctctttcggatttgtttccgtatttaatgccgcacatatatccgccttagagtttaaacactttttacgattggcggaattacaaaaaaacaaaacaaaacaaaacaaaatggttttttttttttgtttttttcggatttatccaaagttgaattcgatagacaaaaaacccacacaaagagaaagaaagtgagggcgacaaaaacacagagacgaagcaaaaatagaggaagatcaccattgctctgtgtgctatatagagagaaagtgaaagaaggaaagaaagaaattaaactatggaaacatttgaacttttccatcctacttttcctatcttactttaacctttctccttcccacttgttgatcaactagcacttctttttcttcgttcaagatatttggtaatttatcttactttgaaacctgcccttaccccttacttacaaatactgtctaacaggtaatatccttttctaaatccttcaagttattgaaaagaacaaaaataatacatatctatatctatctatttatatatacaaatttacgcacacatatatagaaacatggtattatccaacgttctaacaaacttggttcgttcaaaaccagttttaaattctgcaaaaaaaaatggggttcttttcttaaagaccactctattatcaaggacaaccccaataaattattccatgagatctgcctctaccttcaataggactaagcctcatgttaacatcggtacaattggtcatgtcgaccatggtaaaaccaccttgactgctgctattacaaaaacattagctaagactggtggtgctgatttcttagattacgcttctattgataaagcccctgaagaaagagctcgtggtatcactatttctactgcccatgttgaatacgaaactgcaaagagacattactcccacgtcgactgtccaggccatgccgattatattaagaatatgatcactggtgctgcccaaatggatggtgccattattgtcgttgctgcaacagatggtcaaatgccacaaactagagaacatttgttattagctagacaagtcggtgttcaaaagatcgttgttttcgtcaacaaggttgatactattgacgatccagaaatgttagagttagttgaaatggaaatgagagaactattgacccagtatggtttcgatggtgacaatgctccaattattatgggctctgctttgtgtgctctggaagatagaaatccagagattggtgaaaaggctattttgaaacttttggacgctattgacgaatatatccctaccccagaaagagacttagacaaacctttcttgatgcctgtagaagacattttctctatctctggtagaggtactgtcgtcaccggtagagttgaaagaggccatttaaagaaaggtgaagaagtagaaattgtgggtcacaacaaaactccattgaaaactactgtcactggcattgagatgtttagaaaggaattggatgaagccatggctggtgataacgctggtttattattaagaggtatcagaagagaccaaataaagagaggtatgatcttggccaagccaggtactgttaaagcccacaccaaaatgttagcatctctttacattctatctaaggatgaaggtggtagacactctggttttggtgaaaactacagaccacaattatacatcagaactgccgatgtcaccggtgtcttaagattcccatctgaaattgaagatcactccaagcaagttatgccaggtgacaatgtcgaaatggaaattgaattaattcacccaactccaatggaagttggccaacgtttcaacattagagaaggtggtaagactgttggtaccggcttagtcactagaattcttgaataaatgatgtgatactatcttattattttgtaagatgtggattaattaaatcatgacatacaaacacacaagcacatatatatgtatatgtatatgtatgtatgtataagttacatgtaaatataatatagtaaatggtgtttcaggaaatagatacaagatacccatttagtcgataaatttatatttcacatcattcataacagaatatttatgcctattcgttttctttgtacaggttgttttattcacgaatttttcttcaacaaggaacatcgtatatttccaattaaagaaaaaaattatcaaaaaaagtaaaaaacaaacaaacaatgtgatgaagttgaaatatttagagtatatttaataattattatagtaattatgatggttcgttaaagagaacacatccacagctaaaaatattctaacaaccataccaaagtaccaacatctctatatccaactgctaatcctaacttactctcgtttttttctactatttttttaatacatattttcccatcactaaagattggttaatatataaaagcttactgtcagcttttaaaccaagaaaaaatgaatacaacttccaaacctttaccatctacacctagtgaaggaaaaatttcccaaaatattcattatgatataccctcaaatgaagagtatcgccctagtggcataaaagagatgaaacaaaataattacagtggagagataaagagtatatctccaaagaaaagaaatatgacaaacaaagaaagtcctaataataatactcataatattagtgatacggatgaagaattcgaattcttccatgaatttaaacgtgaaaaagtaaaagatgttattcatcatatcacatcttttttgaaacaaaatgcaatagatatagaatatttaatgatcccctttagaccggaacaaagcaatgaaaaactactgaagtttttgaatgccatcttcccgctaggcaatggacaacctgttaatgaaaaatcacaaatgaagattatcaacaaaacagatgtgtggactctatttcaaagtttgaaatatatatggtgcagattaccaaattctgaaattgttgggtggaaagcatacctcaagttcaaatataaagaaatagagaaaaattatccccaaaaagcattcttggaaattatgcctcaatgtttggattcacccaatcatgcctcaatcgtttatgatttttttgatttaattgtaacattatcctcgaattctagggtaaataagatgagtgcaagaaaagtagcaaaaatgtgtgctctatgggcttttaaaaaatctaatataaatacaataaatgatcgtgatactgacgactaccgagatgatactgaatttatggatataaataataagaattcaagagagggtccaagttatgattttgatgcaaacaatccgagatttggcaaaatcaacaattcttttcaagatggtcttaatgaatggatccctgcatcagacgctatgttccatttactgttatcctttttgaagagttttgtaccgagagacttagaaagttctaaattgcctaaatctttaaaaagtattttatttaacaatgaatacccaccaaagggatccactgcatacacatcacaaactattttaacaattccattagtgacattatacacagataaattttcaagaaaaccgtggcaattactagagagatgtaatgatctattagatttttcaaatcatgatgcatttgaggctagagaagattatgccttactgaaatcgttatttaagaaaaagaataatgttgaaggtattagtcgaaaaatgtctcaggagtcaaggcgattgatgaagattatgtctacaaaacattctacatttcaagcaggttgggctccccgtagatgtgtaaataatatttatgaattgaaggaaaatatccaaattcaaagggttgatattgatgattattttatctggacctggctatcatctttatcatacgaggaaacatctgaaaagaaaaaaatctttggtagatcgttaattctagaatttgaatttgatggattcaaaaaatgggttgcttttgaagaatgtgatataacattacattataaaagtactagtcaatttaaaaagaatcgaattaaaaagaaaaatgataataacgatcgggagtccataaattccaataaagatagacctttaccaacaaagcaaaatagtacacctgtatacgaaaaattccaacaggaggtccctaatcagagtatttccaaagttaatcactctgttttaaatagtccatcattaacaccacagggccaatatcatacaataattgatagaccttcatcacacaaaaaccataaacccaatcttcatgtcttagaagagaaaatttcgaagtggaatcctctaaataacttaagaaagaaaagtaatagtatagcaaacgaaaagaatgagagtacatcttctccggaaatgagaaaagaatttgcatcctcttcaatctatgattcatcccaatcaaaaaccacaaacactaaagtaaacgtaaatacggaacaaaattccaataatatggagaccaaatcaaaagcaagagttatttctcaatacagtttgttagatccccaaaaatatcaactccctgagattgagaaagatgaagaaggatttcatattgatttatctaatatttctaatagcttatcagaacttccgcctattgaaaatgaacctgagagcaatatgttttctccatctcagaaatttacagaggacccagataacttagattctaagactcaaaaaatacaacacaatatccaaccagacttgaaagttgaagaaagatatcacgtaaataacattccaacaagagaaaataggattccttcaacattgcataaatcatcagaacatgcatacgcgaaccaaactcctatagtaagttataccaaaatttcaagtgaacgtaaggaaagacattctgcagcagaaaccttagaagaattaagcgatatggtagacggtatgatgtcacaagatgaagtgactaaagtacaagctgcaaagacatttgaagagatgacaaaatttgataaatataaaccaaaagactttgacgctgaaagttctatatctagtgcagtaccttctctaaaactaactactactatagatggaaatcaaaaagcttcagagagtttcaagaacaatatgaaaaatactaattatagacaacgaataaattttaatgcacattcagaaagaacagaaaagcaagattttactaatcaacaatataatactgaaaacatagctacatacaacaagaaagataagattataccacaatctagtaatacatctgtggacaaatctgatcctcaacacgatcaatttagtattatccctagagataatcagtacgctccaaaacaacaaggaaatatatccccaactcatgatttaggaacttatactcttaggaactctcttgaacggagtagcatgcaacaacaaactcaagaacaactaagcgttaatgaatcccctctgaatgtacaacaaaattaccaaaatccaacataccaaagtgtaccacaagttcgccaaaataaaccatatattgttgcaaaccaaacattaccaatacactcaccactatacaatcagaatactgccactaataataatgcacctaactccttatcacaggaccagatttatcaacaacagtggatcaatagtggtagcagaccaaattcgacatctcctgtcagggttaaacttcaatctcaaccccaagtttcagtacaacctcaagtatcaccgcaaccatacaatatacaatctactccagctgcaggttttaacaacaagcaatatcaagaacttaacggtaattatgcaaacgtatctaataaaatgcatacaacccctagaactgatgacagcaataactctagaaatggcgatattaataacaattacgattctacagaatctcaaagtaatagatatcagcaagatccttctaaacacatgcctgactatagaccatcagtacaacagccaacattcacacaagataatatgaataagacccaaacaccaccaataaacaaccacaactacagtttaccaccaactatgatgaataaaacgccaattagaggacactcccccaacttcaatggaccatcaccaagtccaaacatgcaacaaggtttcgttgacagcagagaaagaatgcaaatatcacctatccccaaacaatcatatccacaaacacaacaatatgcaataccggtccccgtaaataatggaatgaaacctaatatgtatatcccaccacaacaacaatcaccttatcatcaccctaactatttgccagtccagaatgtgaatatgtctatgaatccaaatagatcgcctcaattagatggatatgcaaatcattttcatcctacgtatggtaataactatggaaatagcaacattaatggtgccagcagtcatggaacggtgataccatctgatatacctgctgcaacgacacacaatacgatggggataagattacatggaaataatattaataagaaacaagaaagaaaacaattatataacaatattcgtagtggtaattttggtatatgaagaataagtatgacactattcacaaacatacctgcatacacgcatatataaagataaataaatagatagacttcgatatacatttaaaaaatagactaagtttactattctgtattcttgaaacttaactaaaaaggaaataaagagacttttgaatgaaagaaaaaaattaggaaattctttcaacatttttaaaaaaaaaaaaaacaaaaacaaaaaaataaaactgatcttttcaatgaatatatatatatatatatagaatacactatatacaacaaaccaaaaatactacagaacaactgacctataaaaagccttgggtgctattattttggtatacatattgctaaacttctaagtgaaccatagaaataataaaataaatctatacgtagagacacacatacaacataggcataaaaaacaaatatgaataacagtagtactttaaatacaccatcagaaacaccaagagagacttcaccaaacgagattatccccaaagacaaagttactggggataataaagtgacagtagaggataataaagttttaccgtgggataaaacagatcatgagattaaaattagaagttttagtggatatacaatcaaattaaatggttggattagacatgatattagaaatcaaagactgaaagaaactaaaaagaatgaagcaaaggaaaaagacaaagaaataaataatgcagataaggagaaagatgagattaataaagaaagtaaagaaacaacaaaagaacaagatgggtctaaagataaaaatatatgataaagcaaaaaataagataagcacaagtattcagaaataatacttttatggtttcatacaaaatctttctccaatataatctaatgaattcactacattcaaatggtcaattgatactgttgatttatttatgcatttttttctttttctttttatattaagaaaaacactcctatcatatgactacaaatatgctacccttaaaatgatggtccgaataaaatatgatatctctaaattggtgtacctctttttcaatattttcactctatatgccaacactaaatggaactctttatagaaacaaacataacaacttaaataaaagagaagaaaaaaagaataaacatttagaatattttaatcccaataaaagagagaccatatcctctatctagcaaaaaaatgagtcgttatttcatattatttctaaatagattgtcatgccgagctcgtagcatatagttttcacaattggtagcgccgctatttatttgcttattactcaaccttaaactttttttctttttcttttttttttttgagtttagtttattatccaggcatttacttcttgtaacatttttcctggtaatatataaatcgagatttcctgtagtttgtgtatagaacttacaagtatttatatttccttcacactgattttctcttgatatcataagtggctattatatccatacaaagcatacgcgttaaataatacatctagtgtttacatgtaaacattacatgtgcttactaattttattaaatatgattttcttgaataaattttttgcacaacatataaattgccagtcacgaaacgtaaacaaaacaaaacaaaacaaaaaacaatggagaattttatgccttattattatatctgtcattgttaccaaaattcttttgttccacatcaaagggctctcagaaacaaacacaataaaaaacaatattgcgtttaaagaataaaaagaacaaatcagaacaaagaaaccagaacaaacgaaaattaaaaaaacattttctttaataggtaaagcaagaaaaaaagtttctgatttttttcttttttttttctttttttccttttttttttaatttttttttgctattactagtaaattattgtcgcatcccactgttaataaataaaattattcttcgttccattagtaataaaaataaaacaaaacaaaataaaacaaaacaaaaaagaatccaacaactgagatgttacttttttttttgttccttacttggatcagcatttcaaacaaagaaacggtttcattgtgcctctattgtttgtcacgtgtgcgcttggtttcattctcgaacaattacattacgtatattctcgaacaattgcgttttctttcttgaagactttcatgtacccagcgatcttgatgtaagtgatttaatgacaaactaagacactcaagtcactcatccatccacatatatccatgttataattttacacattgtagtatctactattcacttcccagatagacaattggctgcacttaaaaactagtcgttgcattcttcttcttttttctttttttttttcttttcttttatgcagaatcctatatttagcaataatgcctttgctaagtttgttttcttttgcctcattttttttttaattcaaatgatttgatccaggcaataaaatgtttcactttgctttattttaatattcttttctcaaaatcgtttaatagactttattatataaaccttcttttactaatggcactcctttctccttcttcttctccttctctcctttttgattgattctcattctaccttcttttttcctacattatatgtaaacatgtcttcgtaagaaaagaaagacatacgcatatatatagggtagggacaaaggtatatcgactatatcgactatatcaatctatctatctttctttctatctatctatctgtttgtttatatatctatacacatacacatacatatacatatacatatataatggtcacttggaagaattgggctactttagctttatctttactacctctaacagaaggtgtggctattccattaaaggataaaaagaatttacaaatctatcaaaagagatattatgactatgataacgacgaagttattcgtggtgtcaacatcggtggttggttagtattagaaccatatattaccccctcaatatttgaaagatttagaaccaattataataacgatgatggtatcccggtcgatgaataccatctttgccaacaaatgggttatgattctgctaaagaacttttagttaatcattggaacacttggtacacagaagatgattttgcttccatcgctaatatgggcttcaatttagtcagaatcccaataggttactgggccttcaacactttagataccgatccttatgtcaccggtttgcaagaatcctatctagataacgccgttgaatgggccaggaaatacggtttaaaggtctgggtcgatttgcacggtgctgctggttcgcagaacggattcgacaattctgggttaagagatcaggtaaatttcccacatgatgacacaaacctagagatcactttgaagacaatcaagtacattttacaaaaatattctcaagctgaatacatcgacacagttatcggtattgaactattaaatgaaccattgggtccatccattgacttaaacaaattgaaatacgagtacttacaacctgcttatgattatttaaggaacgaacttggcaatacagaccaaattattgttatccatgatgcctttatgccagacagtgaatggaacagtttcctaactttggatgataacacatacggtgttgtcatggaccatcatcactatcaagtcttctcaagtggtgaattggacagaaatatcgacgaacatgttcaagttgcatgtggtttagccggtccaaaactagtcgaggcacattggaacgtcgccggtgaattctctgctgcgttgactgattgtgctaaatggttgaatggggtaggcattggtgctcgttacgatggtacttttatcaagaatggtcaaaccagttattttattggttcttgccaagacaatgaagatatcaatgcatggtcaacagaaagaaagacaaacacaagacgctatgtggaagctcaattagatgcatttgaaaagagaggtggttggattttctggtgttacaagactgaaacaagtattgaatggggcattgataaactagctgccaatggtttattcccacaaccaattgacgataggttatatcctggtcaatgtgattctgcctaatgaatatgtagcatatctccccattcattcattcattcactttttttttattttaattttcacacatacatacaaacatatatttttttttaatttctactctctgctttccactctttttgttcttctcatttatatacgaatattctaaaacatataaaaataaaattagtttttttactatattattattattattattattattatacttcattttcatactcgtacagttaaatacaaattaattgagtaatatatgccctgattgtaatcaaacctttttaaccaaggtaatgtcacctgatgtgacacataaaaattcttgatctctctgtaaataattaggtatttgattcatttattttcgtgtttccttctgaaaaaaagaaaaacagataacagaaagaaaaagaacgaaaaaaaaaattataatacagatggaagggaaggaagatttgattaaaaatcttgaaatatgggaagaattattgatttaatgacacaaacaaatctattgtcgttatcatatctagcatacacagatcaagtcataaaaacaacaatataactgtcgataatatagtattaagccaattcaaagggtcggtatcggatatatatcgatattacaaacacattatgcaatctatggttaataatataccgcaaatagatttaactttagaaagttcagattctgatacagctactgaaaatgaagaaattttttattcttttagtaattctgatactgcagacccaaagggattcagtaacaatacaactgaacaagtgcaaatagataacgacagtcaaccaaaaaataatgatagtttctctgatgatgcagaaataagttttacatctaacacagataaagaaaaattagacaatttaaggctgttacaaagagtcaccactttaaaacagaaaaatgatactgatggacagacaacatctttagtacagttgttgaagagtactctacaagatgtacaagatgatagtctcgacaaaactagtgataacatcgaggatttcaataaaaaccaaaactctagtcctaccaaaattcataaaacagatatgtctttaatagaagatttctattattacagttccagtgatgaaaaagttaacagaaacattaataataatattcaaattaaaaaacatatacgaagaaataaagataaagataaggataaagataaaaagtccattgaagttccatcacatacaaagaatcaattacaaaacactcaacttgacaattcatttaatgatcaccaattagattcaaacagtacccatccccaacaatatgaacagtcatctgaatcttcaagtaaaaaaaattatagtgatcaaggaattgtaaaaactgaaaacatgcatgtggattcaaaatttgatacagttaatagtaattttgacatggaaaagatgcaaaagaaaaacttgaataacaataaaaatgtgcaagatgataataactcaaattcattagaaaataattctgtattaaaggaaagcgaatcgtttcaacatactaatgctaaatctgaaagcttgttggcaataaaagaaaatccatcaataaagaaagctatcaggtcactagagttacaggaaaatacaatcacccaaaattctacaaaggaaggtcatgagataaatggatataagaaatttaataaatcatcaaatattcaagtaaaaatagatgaccataaaacacccaaactttctactactttaaaagtaccgttaaaacttgacagtatagaaactctaatattagatagtgattctgataatgatactataataaaaaataatgaaatgtcatccccggtattatcaaaggaaaaggatagttcaacgaagattgtcagttcaagtaaaaaaagaacacatgatgaaatagaagaatcaggagggactgtaattaataatggagataaaaaaaatgatatgcatattttgaagaagcaacatttaccagatgaaaataatattaaaaataatagatcagatgatgcgatcatcgtattatccgatgaggatgatgatatttcaactgaaaacccaaagaaaatattaataacagctgaagaaatgaaaagaatacatgatgaaaagatagccaaacttgtttctgaagctcgtgaaaattttgaaaaatgcgagaaagaatatatcaataaagaaacagaattgagaaaaagctttaaccttcagaaatccaccaaggaaatcctgctgcgaaaagccaaaagaaaagaatttgattacaaaactgcagcgcaaaaatatagattattgcgtgaatcaattaactctaatagcaaatttgttacaggatcaaaacaaatgctgttagaggaagctaagaagacgacggaacgtttaaatcaagcccgaattgaggctaagaagaaggttgatgctctaagtaataaaatttcagaggtagaaaataaattaataactttactagcggaaaaaaatgaggttctaacaaaaactaaaaatgaactagccttacatagcagagatatagcaaccaaagatcttatagataaaagaaaaaaactaatagaacaacagaaatcactacagaaaatgtttgaagaaggcaaagtaacacaacagtcatattccaagctaaataaagaaatcctagatgccttaaattcattaacaaacactgatcaaaaagttaaaacacagacggtagaggctcctcttgctcttggtatgcagaatctttctagttctttagtctctcaaccaacaatccaaacgagaggatatttatatcataagtcgttagagaaggctctggaattactgcaacagagttctactcgtagtgctgttacaaaaaatttgttgagctctcacattcgtattttgaaaaatttctacgatgaattcatgtctgcatatccaatgacggtcaaaaagttgttttctgttagagaatcaactgaattactttttactaatggtgtaaaaatgcctatagtttttgaaattctagaagattttggaattgaatttaaaaacaataatatcttacctattagtagaagaaaagaatacattaaaagtattgatatagctaagcaactggtagtaacatcaaatcgagatgccgctaacaaaagtagattgattgaattgttaaataaattgcttagtttaagaggacaagtagacttaggcaaaccaccaacatattcagttatttacgatattggtgcctctgttgtagaattgatccagcagggacttaaaatgcaaaaagtgtttgatgtactaaagtcttacgaaacaccaatgacaacattagagttagctacgtattatcaaaaacatattaataatttggcagttcctgcacaaatagctccagatacaggcattaggtatactcaatggtcattaaatggtagtgttaattcgagagaaagtccttcaatacaatcaccatttgtaaattccgatactgaaagtattcaacaatttcacatagggaatattcatgatgtaaacgaacaaaaccaaattcgtgagttattgagcagtctaaaagaaactgagagtactattgagggggaggagttaacacctgatgaaatgactgttaacttattaaagcaccaaagaatagggctgaagtggttaattgatgttgaaaattctagtaaaaaaggagggattttggctgatgatatggggttaggtaaaactgtacaagcaatagctttaatgttggctaatagatcaaatgacaaaaagagaaagactactttagtcgtagctccagtttctgtattacatgtgtggcaaggagaaatcaaaacaaaaatcaaacaaagcgccaagttttctactaccatctttgggtcttctaatggaaaggtgggtcattggaaacaattagctcattatgacgtagtattaatatcctaccagactttagccaacgaattaaaaagacattggcctgccaaattagaaactgatagatctcatttacctgctattcctgatttggtagccttgaattctttgaaaagacctggtgagtatgtatcaccatttttcactaatcattcaaaattccatcgtgtgattttagatgaaggtcagaatattaaaaacaaagatacacaggctgctagagcctgttgtacactgagaagtaagtatagatgggtcttatctggtacaccaattcaaaataatatgaatgaattatattcattaattagattcctaagaatatccccatataataaagagcaaagatttaagatggatattggtaatgctttttcaaaaaagaatgataaatataatgttcatgataaagaaagagctattaaaaaagttcaaattttactgagagctatcatgttgcgtagagtaaaaacagataccattgatggaaaatccatattggaactacctcctaaaacaatggaggtattagaagcttctttagttggtaatgaattagaattttattctgaattagaaaataaaaataaaaaattggctagcagattaatgaagagtaaggttagaggtaactattccagtatattaactttgctgttgagattaagacaagcatgttgccattcggagttagtgattatcggtgaaaaacggagccagaatacaaagataattaatggtaaaaaatttgaaaattgggtagctttatataaaagaattgaaataatgaatcaaaagcagagggatctagtgaattcttcacttaatatgatgacatgttcatattgcaatgaagaactagaacttcaaaacacatgtgtattaactggttgtggtcatttaatctgccaagactgttttgaacctatggtagaagaaatgtctaatagaccgaatgcacgggtgggacaacttggtgaatattatattccctgtaaagattgcaatgaaataacgtgtgaacgagaaattgttagttataaattgtatgatcaagttgtcaatcaaaactttacgttaaaagatttagaaaatgaatactattgcgagagagctaaacaaaaacaagcattagcattaggcaattacaaaccagacttccctaaattagaagcatcaacaaagattaggcaatgtcttgacatcataactcaagtgataaaaaattcagataatgaaaaaatattaatattctcacaatttactacattttttgaaatattagagcatttcatcgacgaagaatttattaaaagtggtaaatacaatgagattgagtatctgaaatatatcggtatgatgaatgccaatcaaagatctgatgtaattaatgaattttataataataagaagaaaagaatcttattgatttcaatgaaagcgggcaattcagggttaacattaacttgtgcaaatcatgtcatcattgttgatccattttggaatccatttgtggaagaacaagcgcaggaccgttgttatagaatcagtcaaacaagagaggtcaaagtttataaattgttcattaagaattctgttgaagatagaatatttgagttacaaaaaagaaaaaaggagatggttgatatggctatggattcaggtaaaatcaaagaaattaataaattaggaacacgtgaaatcgggttcttatttggactaaacgatctataatagacaagattataatcatcacgaaccagaaaaaaagatataaaaaaagaaaaagcaaaaaaaaaaaccaagaaaagagaaatcatggaaatcctcatatcatgtccatcaattatatgtaattctaactataaatatatctatgtaaactataataaaatgctgaacaaagagaagtaatcaaactgattattccagcagcattcaacttttagactgcttcgatttccttgccgatttaggcaatctagataaccttctattcatttccttaattttggataatgtcccgttataaggatctaacaactgacatagtttatttatcttcaataaattattatcattaatctgaagcgataacaaaatgttttgatttttcaaattatcttttggtatcagtaacccagaaggtaactcttttttagccaatattctagttaacttattcagattttgattcaatactaatttattatttaatttagattgtgtgttatctttaatattattatgatagtggtcgtggtgtgaaatttgtttaagattgttacattcttgttttgtgttgatcaattgcaatgtcaattttctttttacccgtttcaatctttgtaattgatgatataattcattattagcgatatttatatctttaatatcattaaaatctttattaattgaatttaacaaatcataaaaaatttttaggtcgatcgaatacattaaagattgaatattattgttatgaatatttttcaagtcattatttgccttgaaaattaaaatatttttgataacatgattgaatattgattgtaaaacattaatggatatcagagaaattttcgatacaggtatatttttccaattaatatttttaccatcatatgaatgaatttgattatagttgggttcaactgttgtatttatttgcattctatgtttaaagtcatctgctgtcttattcttattcttatcattaacattatcatcatcaacaacatcatcatgatgaaaagtgttatttaatccaaaaaatccagtacttctatcattaaaattatcaatatgatcaatgttagtatgactatcagaaattgacgctgtacgtaatggtgttctgatcacgacaacattatccaagtcaacagttcttcttagatgagatcctctttgtctgtataatctctttgaacttctatccatcaggtatgttaaagacttaataactcctataataagcgactcaaggatatgacaagcaaaaattttgttggtaaatccattaaccctcaaaagatcttcagctttatcaatgaactaaagtttctgctacttctttttttttttttattttttgtttattacttgactatttacgtggtttgtttatgttagtttatatacattttattttttgtaagggaatgtaaatataaagttagggtttgtgtagttttcttttatgtttaccttcaaatacatatagaaagtatagggtttaggctaaaaagaagaaaacatgttttttagaaaagtcgaattaaaatttctccaaacctaatataatttgttaaatctcacaaaaatcatcatctttctccaaaaataccctatattacttaatcaacatgcgaaggaaatgttaaaaaaaagaatgaaaaaaaaaaacacaaggacagatcacatacccctcaccgttaattccgctatcaaaagtgtttctataaacaaaaccaaacaaaaacccataccttaaccgaaaattccatttaaacaaataaaaagaaaaaaaagaagcgtataaaagacaaaagaaaaagattcacttggttattgttatttttttttttgttaatattcagaaatttaatggatttaaggggacaaacaaaatggaactcattgaagatacgagtagccataattttcatcagtaataaacaccagatcatatagagattgttgttgttgtcgttactattgaacattgaaacataactgtttgagctagagaattcagtaaattatagcacattatactatcttaccaaacagttcctgagtagttctcattgttgagttcatgtttattagagaagattgtcaaaaagaaatgcaaaaaaagaagaaagctttgtgtaacttagggaaacattagatgaaaagttcttttctcttcacttaatttgttttcatcttttaatacttagtttttcacttgttcacagtatctgtaatactatttctatatatcatttaatcattaatgattagagaaaaacattagttattaattatttttctttcgtgtcttcgcctgcatacacagatttatatttttgtcggtatagtttactttttttccttccattttgatatattcccttagatctgttactataaactctaattacctctaactaccaattgttgatttgttaaccctcatatactgttgttccacaataatattttgagtagtggactatccatttaataaaaaatataataacaaaaataaaaaaaagttaaaacacaaaatacaagttcattgaataacttagttaagaaagacaaaaaaaaaaattaactatattatttccatcttttttgattatatttttttattttattttatttttttcattactgttacttttgcatcatccttctaaaggttattaatattaaaaataataataataaaaataaaaaaaaaaacaatatgatatcatcaccacaatcaacatattcttcatcttcaacttctacatcgatacattcaccaatatctactaatattaatattccgttaccaccaagttctacaattgaaacctctgatgaacctccaaggacgctttggatgggtgatttagatcccaattttgatgacttgactataatggaaatttggcatcatctaggaaaaagagtagttgttaaattaattaaagcgaagaaaaatttactcataccatgcagtagcaataacaacaatagtagtaataatggttctaatctatctgattctgtatttgatacttttgattcggcaaacattgaaaaaattaacattaatggtatatcctttattgatccatctgtcacacctttacatcatgctgggtattgcttcgtagaattcgaatcacaaaatgatgcaatatatgcattatctttaaattccaaacctattccaaactttaaatctctctcaacaaacctatggactaacccaacaaataaaagaacttttagattaaattgggcttctggtgcaactttgaacagctcgattccattaaaaccagaattttctttatttgtaggtgatttatccccaacggtcactgaagccgatttgttgactttatttcaaaaaaaattcaaatctgttaaaactgtaagagtcatgacagatccaatgactggagcatcccgttgtttcggatttatcagatttggtgatgaattggaaagatctaaagctgtcattgaaatgaacgggacttggtttcaaggtagagccctaagggtggcatttgctactccaagaaattcaggtgtgacaccattgtcatctggtcccttctgtatgggtcagcaaactggccacctttttaattctgcaattaataataacaatgcaacttcatcgatcgttaatagtaactcgtttccaaataaaaatataatacccaagaataatccacttgtatcatcatatagtaacaacaacaacaacaacaacaacacaaacttcatgtccgctaatggtactgcaaattattcaataccctccccatcaagtgacatccaagatttccaatatattacaaatgatcccaccaacactaccatctttgtaggtggattaaactcaagtaatatcagcgaatataaattaatctcattgtttcaaccttttggtaatgttgtatctgttaagattcccttaaataaaaattgtgcatttgttaaatttcaaaatagaattgactctgaagctgcaatgcaaggaatgcaaggttttgttatcgatgggtctccaataagactatcatggggtaaaacaaacacaaatacacatattccacaagtaacaacagtaacagcaacaaataatagtgctacgacgataccaatcagtatgacccatagcaatagatttatctcaaattgtactaatattcaacaacaatctgatttgttacctactttcaacggatcaatgtggagtgattcagttaataatataaactatgcaaattcaaaccaattattccaaggaatctcaggctattcaaatgagttgtttaacactgataatagcaaaaattataattatcaaaatcatcctaatacaaatgtgaatacaaacacgaatgcgaaccaatgctatggactatcttcttcaaatcaacaaacagatatgttatatggtacacattctacgttaaccaatactatggcaccaaagataaactcattatattatgaaaataaatcgtcattgttaaataaacaatttcaaccaaatttttcaagtgaaatcaattaccattcatacttaaatcaagcaaatcaaaacctacaatattacaatactatattccattaagtcgaaataaaatcgtatcactttctatttttctctttttatcatattctaatatattgtttccctttttttttattattatttttatatgaatgtttttgcttatttcatttaactatctattaattttatttcacacttttagaccattttagttatcgtaccatattgtattgtaccgtaccatgtcatactttagtactgcttgttcacatttgattataatttgttttcattatatttgacctattttatttatttattttgtttcttactgttattgttgttgttgttgttttgattttaacattcatcttctacttttactttattttgttatttgtttttgttaataatagtaataataatgcataatttcctttacactattaattatatatacacatattcattatatagcccttatatacattttctctatctgttttacatttattttactttaatcttttatttcttgctattttctcgtagttgccatttgtattgaatagctatttacaagacatataaaacgaattgagttacgatattcacaaggaaaactatatgcatctatccttacaaagaataaattgccacaataaactattcaatatggtttttagaatagcacatacaaaaaaaaagaaatgtaattaagaagaataaataaatgaacgaacattatatatttgtatagaagcatatatataataccaacatgctttcattaactttatttatggtgctagtttatcacttaggataatctttaatgaaggaaagaagaatcaaaaacaaacaaacaaacaaacagacaagaaacggagtgcatttttctttttctttttttttttctttttttatgaaaaatgtatagggttagatgttcttaattatgaaattctaaaaaataaaacagggtttctttaaaaaaatagctctaatggcagattttttcccaaactgtgtgaataaagcccttacttttttttttttttcattttgtgtattttttgacatttagaccaaaagaaatcaagaaatacaagaaaaataaaaactgtggtgtattgttctactattaattactacacaatactgattacaatatgtacatacatacatacatattctacaattgtggcttttataatttgaaaaaaaaaaaatgacatagtttgatatagacaagaagtcacatataaatattgatgggatattttgtagatttattgaacatagttccccctcctttgtgaattttattttctctaaaattatacattaagatgaaacaaaaaaaaaattaaaagaataaaaagaagaggaaaacaagaacaatgagatctttacaagtagcacatagattagaaggcaaggatgttctattaatcggaggaggtgaggtagccatgacgaggatacccaagttgttaccgactggatgtaaaataacactagttgctccaattttagataaatttctaaaagagaaatatttttgttccaataatggtatacatacagtttccagtggtcaaataagtattagaaaagattggacacctgaagattattccatttataaaattattgaatccaaattccatgaggactatttattacaatcttcgacgtggtcaatgattttgctatgcatacctgacaaattggagtctgagaggatatatcatctttgtaaacgcaagtatggtcaacaacaaatgattaatgtggcagatatccctaaattctgcgatttctatttcggttcgaatataaatttaactaaagatggtaatttgcaaatcttgattagctcaaacggattatcaccgagattcacttccttagtgaaaaacgaaattggctcaatgtttgaagactgggaattagatggagcattggagaagctaggacaattaagatcaagtatacgtcaactaacggatatggacatcagtatcaaatatagaatgcaatggatcaaaaaatgcactgatatttttggtctttcttattgccataaaatcgacgtcaataagttagtggaattatttaaatcaatgacttcaattgaaccgaagagtttagaattcccatcaagggaacacatgttgagtaactacacatcgtaaaagaaataaatcaataaatcaccacactatgtacatataaaataaaaatacaatagcatcaaaccttttagctaagtcctcaaaaatctagagcgcgttgtacgaatggaagcatcacgtgaccattgctggattctttcattttttttcttttatgtgtccttcttgcccctccccccacgcgcgcgccagttgttgctgtttttgttgctgtttttattgtttttctctctcgatacccaagcagcccgtggagaaaatacgacaatggagacgtgaattcgacattaaggggtaggaataaattgcgtcaaataatgcgttgattcttcgtaaacaaacacacatgtatataaatatatatttatatacggatatgtgtaacaaagaatgagcagctcaatttaatgcacgttgtggattctatactgaagtatttctgctctatttgtgaagaggatattgaactaacattaagaataagtgaaaacctctgtgctgtttaagataatttaaaatacaattaatttgcaaaaaaaaaaaaaaatcatagcagagttactattattttgatctattttataatcatcatttcaactctaagttctaaattgtgaccaaaaaataacgttaaaaaaatcagaaaacaaaaaagaaattaaagactaatattactttaatatataatcacagacatgtcacaagaacattctacatctaaatctttcaatcatcaaactaatcaaatgagcgagtctgtatctgaaacgttacgcaggactagtaacgatcctaagtgggctagtattcccttaggcacgttaattgagacaaataaattgatttttgtaccaggctctctttctgtggaggaagcttttaatacattagtcagaaaccaattaaactctatcccagtagaagtatttcctggtgatatgaactgtttaacttttgattataatgatttaaattcgtatcttctattagtattaaataaaattcaagtcaataatcaaaaagttacagaagagtgtcaaaatggtaaaccagtacctgtaggtgaaattgtaaaattaactccaaaaaatcctttctataagttacctgagacagagactttactcactgtaatgaagattttagggtctggtgtacacagagtagctatctgcaatccagaaatgacttttgttaaggggatcctctcacaaagaagattaatcaaatatctttgggacaattctgaaaactttacttctttagaaacgttattcaattattctttacaagatttacaagtcggtgtattaaactctcaatataaaccaacttcaagacaatccagagtcatttcaatccatggtgatgaaccattgatcatggcattatataagatgcacgttgaaagaatctcctcaattgctgttgttgataatcaatataaccttctaggaaatatctccgtgactgatgtgaagcatgttactagaacatcacaatatccactactacataaaccatgtcgtcattttatctctgtcatattaaattcaagaggtttagagacaggtaaggactcttttcctgtatttcatgtttacccaacgtcttctctaggtagaacattggctaaattggtagctacaagatctcataggttatggattgttcaaccaccagaatgtgtattagcttcacaaactagtggaactgcaggcttttctcaatctaattctaataatacaacgataccaactcaaactgatccacaatttcaatcacaattatctccaacaacaagtaataacagcactgttaataacccaccaccatcatcaaatctatttgaacatgaatatagatcaggcaagttaattggtgtgatctctttaactgatatcattaacttatttgtcagagtaactattgattatagagaagtcgatccacaaactgcaagaagacaaagaggaagtgttgcataatggaataaagaatagtatactaccttgcaataggcatataatgacattttcagatttctaaaccgttttttttttttcacttcattttcgtttatcttttatcttttatcttttttttttgttgttgttttaggactcaattcattcatgaacaagataataccttaatgatttattgtttataaataacgaaaatctagttgtttaacaatataaatgacaaatttcctgttttaaagtgtgcattatccatagtttctgaatcttatatttttttcctagtttgattctattattgtatgatcgttgacatttaagagatattcgttttatttatatccgtttatatacatttttgatgatatatttataacagcataccaacatactgccaatcgtttttacttctccccctcttttgtgatatctgtatatgtatagtttatattatttaattgtgtttataaacataacccaaacaccacaacatgtgattataaagtgatgtcatattttttttttctgacgttctttggaatgtgaaatattcttaattcacaataacagatcaagaagagacacaagatgttggaacaacacacaacacacatagaaggatataggaaaataagtagaaataaaaataaaaaacatcagagcacacacacacacacacacacacatatatatatatatatatatatatatatatatatatttaattgataattcccttttttctttttatccatctcttctaatactaataaaacataaatcaaaaggtaattatgattgatagtgattcaaaatcaggtaagataacgtcatccaatattgaatccaaatctaatatatcaactacaaacactaatgatactaaaatagccaatataactacaaatgacaaatctgaaaaaatgttaaaaagtaccagaaaaattagtaagtctgtcaaaagaagatcaactgctgatatcccgacacaaaagacatttaacaaaaagaaacaaaagaaagctaaaactggtctacagacaaatgaacaaaagtctaacacaacaaggaattcaactccaatttcaaccttgacaggaacacccttcacatctactggtgtatcttatttaaatgaaaatattcaaagtggtgcattaaatattgcccaagaattggctatgaatagaaataacactttgaactctttgtctcctgaaataacgtatattatttcctctcagaatcaaatagcagataatcctttccaaaatattcataatgataacagtttttcatcaattccaaattcagcccccacaaccaatactaacaatagtaacaataacaataataataacacacttactcaagcagataataaaccaatgaaaatcacatctttgatatcaaaaacagtatatccaagacagagaagacttctaaatcctggaaatggaaaacttgaaatgttgaatagtcacattaatattgaaaatgataacaataataagaacgctatagtaataacacctaataataatacttccaactctactgtatctaatctatatcttaaatctatgcaattattgaatcataaaaataactctaaaaacaacaataataattatattactggcagtgataaccatacacaatcaaatatcttacctgtttccagcacagaaaatttaacatcaaataacgaagaatattttttttcatcatcaataggatccacttctaccccgtcgtccaatattgtaaataatatgccgttacctgttcttgctagctcaaatacaaagactcaaagtaaaaaaaaacagattgtcaaaaagtctattgaaacaaaaaatgatcaaagttctattcttgatggcacatcctcgtcagtaaataccatcactagtgttaataatagttcttctgaagtaacaaaatctacatcatcacaagttttaacatcaacaacaaataggaaagtatcaacaaaaaagacggctactttaaggaaaaagaaaactaattcagataataagactactagttctcctaatgttaatacaactaatactaccactgttcctgttacatcagttgctgcaagcatacatttaaacgatattatcgaatctaaagtaaaaaatttgcccactttgaaacctaaaccaacaaataccagtaataataatataatgactagcccaaacaccagaatcactattagtaaaacacatatgccttcaattacaccacccctttcaacaaccagcgataatccaaataataatgattctgaagtttccacccctaagagtaattcaccatcacagtccaatttaaaaaagtctgccagttccacaacaccttcttcaaagactaaaactaagaataccgcaaaatccacaagcacatcatcatccacttcccctactgcattaacaatctctaatatgacaaataaacaatcttcaaagcctatcaccgcaaactacacagggtcagctacaactttttcaaagattaatgataatagtaacccaacatcatctccaactgcaacaacaatagtagctagaacagctacaaattcagcaaatactccatcagtaaaattaactgaaaaaaaaaaatctgttgtaaaagtgctactatcagctccaattatagaaaatccatcattagtaaagtcagcttcaatactttcagaacctaaaagtcaactagatcataaatcttctaaaaacacttctacaaaagaagaaaaagccgtcattttaaatattccattatatgatacatctgtaaatgactatctagatgaaaatggaacagtggtagttaatgtaattgatctaataaataagaaaatgattcataataactcaaaggataaagcaaatctagaacaggaaaaaataaacaaaagaggtattttcataaacaaaactgataaagttaacttaactggcattaatacagatggtgacgatattaacaaggatacaaagaaaaaagcacacccaatgaagggtaaaagtcaaattggtaagtatgatatggaagatccctttattgatgattcagagttattatgggaagaacaaagagcaactactaaagatggtttctttgttttttttggacctttaattgaaaaggatgatgttccaaagattgaaagaacacaaagttctttaaagaggtcgaggcgttaacagattgttacaactttaagattgcattgttttctaaacgctaagtttaagaatggtaaacattttctgtaacacaagcatgattgtttagtgctgtatttaatagatgaaataattatgggcataattttactatataaaaaatgaatgtttatctattcttggaatatcaagtaatatatagaaacatatatacctacatatggtgcaaggatagtgctataagttttaatttatagtgactaatccatcagtgagtttaattttgattcaaaatttttttccagagtaattgatttgaaatcagattcaagtgattttattaaatttttatcccaaaaaggtttcatcattgacaaaaatttcaaatatacgataacaattttatattcatgatcagtctttttaacattctttgcctttttaatagaatctctgataatatttgttaattcagacattctttgtatagttaaattgatagccatattagtatcatcttctttttctttcgtatcattgttattaacaactacgtcctttctctcagtgttagagatttgcatactagataatttatctaccaattccttttcttttgtttgatctgaatagtataatccattatcatccacttctttgatcttaggaaacttcgtagtgaagaggtgtcttaatatcccgatgattaaatatttcccttcaatgtatggaaagtcggataaaacattggtgataaattggaatgcaattgattcaggggcacaaaccaataatcgcgtaaataaagtaaattgaatagtcttactttccgctctcttttctagggacactttaattaaaaaacattccaagaatgcagataatataaatggtgatagctgggacatttgttttctcaaatctagacaagagttattattaacacaaatccatattaaatatcttattgcaccatccacagcactatttgagtatatcttagacataatgtccagagatacaaatcttaaaaatagatatattgtatcatttaatggaatatcaggatataaatgtttctttgacaccaaataatgtaaacttgacaagactataattccctgtggatacaatggcaaatttgtgtcgtgagacattctttgtatgtgataagatagagatagtttaattacacctttgcttatcaatctttgtgcttctaatgtaggcacatcttcaattttcggcaatgctttgtaaattcttttacattcattgatgcaattaattaattcttcctttaaatcaacatcaaaggataatgctaaatcatagaatcgaaattttgtatctaatagttgttcataaaatggcactggaagaactttttgatgactcattttatagtatatctgtacttcactacgatctgtagtaccattgagaccttccgcaatggcaaaagtacaaagatatcttaataaatttctctggatctctatctctttatcaacaatattctgtaattcaacaccctctaatatggtaccatcttttaattccacctgctttggtggatcatttgggatataatttttacaaaatatatagattctacgaagaatgatagacggatcttccatagtacgcttatttgtactgataacatcttcaaaggaagtgactacaatctttaaatatttagaagggtatagtgtgtctattctcttcaaactattggatattaattcataaaccaaatgcaattttaaaccaacaaagaaatcacctggatatctatccatattggccctattaatcacttctgtctctgttggttcatgatcatttttagttacttgcaaatattgtatagtttcatcttcagcagataatttacttaaaatttcacaactagaaattaataattctcttggatttccatataaagcattcgacataaaacatttcataatgagagagaaaattttattattcttcaaaacttcataatgcttaatatttttaccagagatccatctaattaattgtttaggcatatcccaactaattgtaaatgtgacatctcttctctcttttaattgttcatccaaaatttctaaaaactgttgtttatcctctaaagtaccttctttatctaattgatcaccatacatctcaattaaagtaaccaaagagacagggtcgtctaagccattttgaaacgcatctaaaaggtcgatcttaatttcttctaaatcaatcatcttgccttcttaaagcacaataagcaagaatgaagaagtatcgttaaaaaatttaatattattgctgttcttcttttattttgacaaagaagcaaaattcgatgttaaaatatacttaaacatgagtagaaaataaatatacaacacagaaagaaagcaattctttctttacagaaataaaaaaacatatgctcctcctccccacataaatttcttttgatagttttgagtctattcagaatttgcgggtaaaaaaaaatatacagtcaaaaatttcaaaacaaggtccaagtgattacaaacataataaaaaccgttgtaaattagtctaaaattctaagaataaaccattccagttatacacacacagaactacccacttgcagctgtatattttgatagttctgacagaatcagccaatatcctaaactcctgcagtttcacaatcttacaattatagaatgccatagtaaatagaagttctatcaatgacgagtaaagatagctatgataaagaatcaccagtaaaacgtgtggattcgaacgaaccaactatctcacttgagacacaaaccaagagatcagaatctgctaatgactctacaacgtcacacgaaatatataaagtacaaaagaaattagagtcctatacaaaaaggttgtctcaattgggcttaggtctagatagtgaaacaagtagtagcgaattctctcaaacttcttcaaattatttggttccagaagacaatactcagatacatgttagaggatatttctctgttgaaaacacacagtcgctaactaaagaagatccagataatgataaagtgtatggtcatacaaaattaagttccccagaagatccatcaggtatgaaagttaaggtcaagttccagcccataggatccattccttctttgaaacctaagaacacatgtgtaatatcttataataaaccattctctaccataattctctttttgaagaaaagaataaaggttaatcatgtcttctgttatattaataattcttttgcacctagtcctgatgaaagagtgggagatctttggaatcaattcaaagtgaatgatgaacttataattagttattgtgcaattgttgcatttggttaactatataatatttccatataatcaaattgtataggtagtttattgaaataacaatatatgtatataatgctattaaactattttacaaaattacatgacatcacataaaatgattattaaatgaatatcaatcaatacacataaaaaataaacgatagttttcatctctatcttaaaaaaaaaaacgttatcatatcattaaccatctttatggtttgacttcttctaaaacaactaataaatcagaagcgtcaacattttctccaccatcaactaatacctctttcacttgaccatcagtttgtgcagagataaccatttccatcttcattgcacttaagacagctacagcttcacctttcttgattaaagagcccttgtgaaccttaacttccacaataacaccagccattggggcaccaatttggaatggatcatggttatcagcctttggtttagcaacagtttccaccttttgagatctgtcaacagttgggatctttctagtttcaccattcaactcaaagtaaacacctctgataccagtttctttatctaaatcaccaactgcttgtaatttgataattaaagttttaccttgttcaatggtaacttcaatttcttcacccacaatagcaggagctaagaagcttctagttggtaaaacagataaatcaccgtatttctctctaatcttttggaaatcttcataaacctttggatacatgttgtatgaagctacatcacattcagtgatatcaccaaatctgttgatcaaatcttccttgatgccttctaaatcaaatggagctaattctaaacctggacgagtagttaattttcttctcttatttcttaacacattggatcttaatggttctgggaaaccaccgtatggttgaccaattaagccttcgaagaagtccataacagaatctgggaaatctaaagaatttgccaatcttctaacatcatcagaagtcaacttattggtaaccataaactgggctaaatcaccaacaactttagaagttggagtaactttaacgatatcaccaagcaagtaattggcctctctgtatgctctcttagtttcagcccattgttcacctaaacctaattgttgtgcttggaataataagttagttaattgaccacctggaatctcgtgttgatagacttctgggtctggtccttttaaatcggcaccgaaacatgaatataataatcttatttcagcccaatatgcatctagttgacgaacataactttcattgacacctgtgttaactaggccatccaatgaagctaataaagcattaatagaggcttgagatgtcaaaccagacatagaattgatagccacatcaacaacatctgcaccagctaaggcacacgcagcattggaagccactgcagtgccagcagagtcatgagtatggacatggattggtaaatcagggtatttagctctcaatgtaccgatcaacaacttggcagcagctggtttcaaagtaccggccatatctttgatacctaagatatgggtacccatttgaacaatcttttcagtgatttctaaataataatccaaattgtattttttacctggttctagcatgtcacctgagtaacagatagtagcttcaacgacaccaccagctttcttaacagcatccacaccgaccttcaattgttctaaatcgtttaatgcatcaaagactctaaagatatcaacgccgttctccttagcttgtttaacgaaatgatcaatggcattatctggcaaggaggaataagcgacaccattggcaccacgtaacaacatttggaatgggatatttgggactaattttctcaactttcttaatctttcccatggatcctcgtgcaagaatctcatagcaacatcaaaagtggcaccaccccaacattcaagagcaaaagcaccagataaagcatgtgcagtggttggagcaatggcgacaagatcataagttctgactctggtagctaataaagattgatgtgcgtctctccaagtagtatccattaataaagtaccatcaaatttcctgacttgtcttgcaaattcttctggccccttttctagtaacacttgtctccaaccacttggaggagctatgttatggacatcgaggatatcaccattgtttgtgtacaaatgtgggatgtctgggttcttatgcaattttggaagaccaacttgacctttaatagaagaaccgttgactactaaatctgctaagtaatgtaacaatttctgtgctctattctgagatgaaaccattttaaacagttgtggggtatcatcaatgaaagtggtccaatagtcaccggagatgaacacaggatgcatcaacaaagttaacaagaatgggatattggtctttacacctctaattctgaattcgatcaaagcacggatcatcttacggcgaacgatttcgtaggtggaccctgaacaagaacatttaactaacatggaatcataatgaggggagatgatggcaccagaataggcattaccaccatctaaccggacaccattaccaccagcagatctgtagacttccagcctaccggtatctggttggaaattcttggttggatcctcagtagtgatacggcattggatagcaaaacctctagttgtgattttgtcttgtaggagaccaagttgttccaaacttgcaccagcagcgatttggatttgagctgcgacaatatcaatgcctgtaatttcctctgtgatggtatgttccacttgaattcttgggttaatttcgatgaaatagtgtctgttttggttatcgaccaagaattctgcggtacctgcgttttggtagccggcttccttagccagtttgacggcgtctgtcaagatggcatttctcactttcaagggcaaagtctttgctggagccacttccacgaccttctggtgtcttctttgcacggaacagtctctctcaaaaagatgtaccacattaccgtagttgtcggccaacaattggacctcgatatgttttggtttatccaggaatctttccacaaaacaggtaccgttgccaaaggctgtcttggcttccgaagaagcacgtttaaatgcgtcagcgatgtcctcaccttctctaacgactctcatacctctaccaccaccaccgtaggcagccttgatgatgacagggtacccgtatttagcgacgaagtccttagcttcttggacgttttctatggggccaggagtaccagggaccactgggacgttagctcttgcagcgaggtttcttgcagagactttgtcacccacggagtcgatgactgaggctggaggtccgatccaagtgatgcctgcttgggccactttagtggcgaattctgaattttcagaaagaaacccgtaaccaggatgaatgaaatcgacgccgtgtttcttggctatggagatgatttcgtcgatcgcaaggtatgctccaaccggggtatactggtctggctcccctatgacgtatgcttcatcagccttcaatctgtgggtggataaacggtcttcatgggaatatatggcgacggtcctcatggagagttcatgggcagttctgaagattctgatggggatttcccctctgttggcgacaagaatcttgttcttttcacctagtagagcgttgctgtctctgataccatttaatttcaaagacgccatattcataaacttaacgtgaatttttaactcagttctgatttactaatgtttgttggtgttatggtaatgaaaagaaataaaatagaaaaataggttaaaaaaaattaaaaaataatgaaaaaaaaaaaaaaaaccaaaaaaaagcacagctaaattcacactaccttataatatatgtatgtataatataaagacagtggagtactattaaatttatttcttatttagtttagagtattgagtaagttgttttatttatgtatttaaatcgtatattctcttaagtatttttttcttttatcttctattttctattttctattttttattttttgtctttttttcattttataggttatttagaacataaataacaagaaagggagtaaaaaaaaaaaaaagaaaaacagaaaaacaatgggagagaggaatgtagttaatcatagatatatagaaaatacacaacttaaaaaaaaaaaaaaaaaaaacaaaaagattttatataaaacaggatctctatctgaatgatgacggagcttagaggaggaggaaacaaagacagaaaaagaacaagaaaagagacggagagaaataatataatgatgacttaaaacaatttaaaatgggaatagacagaacctttgcaaatattgaaaaaatgaaaataaaaataaatataataaaaaaaaaaagtagcaggattttatgtgatcacagagagttaagtgaaatgaatgagtgagtcagccaaacagatgtatttaacaaaaaagaaagaaagaaagaaaggaaagaaaaatcaatcaataaatcaatcatacagattcgcagagatatatttaacaacttaggtttttattgaaaaatctgtcctcgagagctctatttttttcttttttatttttctttctcgagcgtttcctgtctacgtgacacggaattccttcctcccaccccctcccttttctcggacctcgccggacaaacgtgcagtgcttcgtgtgggatgacgcattgccacaactcctctgtttctcaaaaacaaaaacaaagttagtggcgaccctcgaggttcaaaatagggttgctgttttttttttttgtttctgtcggatgtatacttgcgacgggaggacggggaggataaaacagcaaaaaggccattttgtttttgtttttgttttttgttttcttctctttctttctttgttgtcccaaagatggagaggccataaaatagaaaaaacagaacaaaacaaaacagaacaatatagccgttcttttgctcccttttgttttcttatcttatctttctctcattttccctttttttcttttctggcaaatgaaatcggtttctgataaggaatccgttcgcttatcaacaaccatcgatcatcattgcagacgtctgtcatcactagagacgttgttgcggtaaagtctacttctttttctccctcgttccagttatacatacagaacacacgttccatgacatactataacatactatgaaatgacatgacttcgcatgacataatatgatatgacacaatatttatttgtgtatgtgtatgtgtatgtttatagttatagttatagttatagttatagttatagttatagttatagttatatatatatatatacgtatgaatatgtaatatctatctatctatttatttatcctcgctgatcatgtgcgcatctccaagcacttattggtagtcgttgcaatgattgagcttgtcttttcaaaaatccaaaatataacaacagcccaagcaaaatacacaacgtattgaccacatagtacccatccctcactatagtaaccttgcttgatggatccaactcgatcccgcatttttgatttttctctgatccatgaaataaatagtcttgacccattgacggcatttcacatcttgacaccgtaaagtaactgatcatccacatcacaatgatccttggccacgtcccaccgaaattactcaacgtattcagtaacgtcatgtacgtgccacccaacaccgggtctgcaatccttgtatggaaactcgagatgccaacaaattgcacggtgttcataaacgaccctagcagatgttgcactataacaagtataaagaaccatatgcttatttctttgtctctcggaaatttatacacaacataactacctaatgctgctgctactaaccgacctaaaaacccatataaccatggagttaatatacctgcgtccccaactaagaaactattgattcttttcaaaattgaattgtttctgattctcaacatcttttcatgtggattgtcatcgtcatcttcatcgtcatcttcatttccattaccatctttatttttataattactgttctgagcattaatatacacattcccactttcattattactggggctacctccatgtttgttgtcagaactccatttggccacataatatccaaaaattatctcaaaaggtacatcaatcagcacagtgaccgccaagttctctcttttaaaccctctctccaacaacttcaaatttgtagccccctcattacattggaatgcaatcttggataccaaatgaaccaaagccaacaactggataggcttaagccctaacactttcaaaaaacatttatatatatacgagatattctgggtcctctcatcatcttcctcatattggtacgctacaaccaatgtatttgtagaaccatcataaccttcctggcttttaacattgtgatttttgtgtcttggtaatacagaatatcccgaagcccccttaaaggacaaatgctttcttaatggatgttcacttgtacaaaatccgacatacaaggttaatatgatataaataaaaccagcgaatttcatatatccacctaaactgattaaaccgtatggttttggcgaagttctgaaatacttattgatgaaatcactggaattcaaagatatgaacacagtaaaggaaagaaaataaccaatgtttaatccgacagtctgtgcagttgacgcatacgataacgactgtttagaaagaatagtcaaagcccatccatctacacagatgtcttgagtagcacagagaaaaactaatagaccaaaacaccagactagagacatgatattcgtattgcttatgtcagtgggtaagccgtggaatgcattatctacacctttgaaaatatgattcttactgattgcccaacctaataaaattaagatgatcccacttaccaattgaattggaataatccaggatcttcttctccctatccttctattgtaacacgaatctatgatgggtgaccaaagaatttttaatgaatatgggtatgtggccattgaaaagagacccaaggatgcgaatgaggtatctttggccattgactttaataaaaagggtactgtaccaaacgccaaaccaacagggatcccctggacaaaatataatgctactaaaaggaagaattgaggcaaatcatgacgtgccaatttattattcacttgttttttaggtttcatcactctcttttcttttctttttttttgtattctactttatataggatcagggaaagggccttaagtatataataattggttatcagaaataagttggagttgtctctagatgatggttgtagctgctatttcttctatcatatattatctatatctacgtatgtaaagcacacaattctatattgtgatctgttatacacaagcttattttgtttgaaacgaggatttctaaaattttactttcttttatttttttttgtttacaaacagatctttgaattaaaatcgtgtttcgatagctgtcaagaaccaaacagaaaagtaataagtaagaaaagaatatatatatatatatatatacatatatatacatatatagaaggttagaaagttataacgttgagtattaagaataagtaagtaagtaagtaagtaagtaagcaaatatctagataatcataatagtaataatatacgcatatatttccatatatacatacataggtatatataaggatatatgtacacagaaataagtcaaaataacacaaaattgattacttgagaaaatatagaatataataataatattttaaataaacacaggaaagaagaggtagtggggagggaataaaacagataaaaagaggaataaaaacagtacatactatattccttacaaatttcttttttttgttttttatttcatttattgctataattattcaatggataaaacttttttaactgctttaacgattgttggagcatcagggaatgcgaaatcttctaattctttagcatatggggttggaacatctgcaccagtgactctgtgtacaggagcatctaaataatcgaatgcttcggattccataatctgtgcaacgatttcagaacccacaccaaatgcagggaatgtggattctacagtgaccaaatgattggtcttcttgacggtctttattaacgcgtcgacgtctaatggtctaatagaccttaaattgataacctcagcggagacattatattgttcttgtaaaatcttggctgcctccaaggcgaattgcacatttcttgtgtatgtgacaatggaaacatctttcccctctctttcgatcttagctctatatggtaaagtgaagtctggggataaggcttcttcagagacttcgaaactttcaccatatagcagttcattctctaagaaaacaacagggtttgggtctctgatagcagctttcaaaagacctcttgcatcttctgcagagtatggcacaagaacttttaaacctgggatggaaccgtaccatgcagagaaatcttgtgaatgttgagcagcaacccctacagcacttccattgggacctctgaatacaatttgacacttttgagtccctccagacatataatgggtctttgcagcagaatttattacatggtcaatagcttgcatggagaaattaaaagacatgaattcaacaacgggtttcaaacctttaaaagcagcaccaactgccagaccagtaaacccgtactcagtgattggggtatccacgacacgacgttcaccaaaacgatctagtaaccctttggtaactttatatgcaccattgtattgcgccacttcttcaccaatgacaaaaacgtcgtcatcacggtccaattcttcagcaagtgcagaatttagagcttctctgacagtcatagtctttgtggacgcaaatctgttggcaattggtctagttaaaagtggtgcatttttcacgagagatagttttaatggagtagtcccgtacatggacaatcttttagaaacagccgatttaaacattatcgttgcttgttcgtttgcttgtttataatttaatcaattgaagttataaaggaagagagtgaaggcagaaaatacagaaaaaagccagacgataataactagttatatcaacaaagtctgctctgtgcagtctattgcaaagataccagttttagcaattcagacatctccccaaatatcaagtattccaaatgagttttctctccccctttgtgtcttccactcaataaacatttctctcccttgcaggacattttttcctccccaacaagataagtcaaaaacaaaaaaagtagacagactataaaaaaaaataaaagaaataaaaagaaataaaaaaggaaaagcgaagaaaatgtccgttttctcaaattccgtacttcatgctttacacttcagagttgacactagtgactatacaccatcatgtattatataacatatggttgtgtattctctgattagattatagaaagttcatcatatatactttgatatatattatgtaatgtataaagagtaagagagaaaaagataaataaagtaggaatcatgatctactataggaaaaaggtgtgaggaggacgagggtgagaaaaggagagtaaggtaatcgatcttatagtttacttttcttggattcactgaaagcttgtgcaataatacgtctttgaatcttcccggtagcagtctttggcaatttgtcaacaaaatagatcttaacaggaatcttaaatttagccactttatcactcatgaattgggtcaactcttgataattcagacttgtatttggcttcaacactactgcagcatgcaccacttgaccatacacatcatcttcaacaccaaaggaaacggcttcgtcaacatttggatgagacaacataacactatctaattcgataggcgaaatcttctcacctcctctattgatcaattctttgatacgaccagttaacaccaggaaaccttcagaatcgaaatacccttggtctccggtcctgaaatagttgaatcttttggtgaaattctctttatttgccttttcattattcttatagccaagagtgacgttttcaccacggatagacacctctccgatagacccctgaggcaaaacattatccttttcatccaagatcactacctccacaccctgtggttgtccaacggtacctggtttacgtttgccaggtggcaaattattagatgtcatttggtgtgctgcttcagtcattgcatacgcctcaaggacaggagcttgaaattccttctccaacttgtgaaaaacagcaggagccaaagccgaggaacatgatctgataaatctaatctctggaaatggatccggtttaggaacattcaacataatcatactaatcgtgggcacacagctgaaccaattacaattggtgttgacaaaatgagaccagaacacttttggtgagaaacttggcgggatcaccacggatccttgaacacggaatgaggataatagaacaccaattaatccatgaacatgaaataaaggcatgaccacatatgaacgatcgttttcagtcaatttgtaagttttacaaatgttcaaagtactgcgaacaatattcaaatgtaataaaggaactgtctttggtaaagatgttgtgccactagtatgtaaaattaatgctgtgtcactggaacgagcaaatcctggaaaccgagatggatcatgattaatgaattttggcctattcttcgatgtatagattctctttgaatagttatccctagacgtgtacacatcatattccacggtaaatctttcaagactaaaatatagttcaacaacaaaacattggaaatttaaagcagatttgataatttctggagtcaccttttgatttactgtacccttgggaacaataataacacgggactttagatcattcaaataaaaattgaattccttttccttatatttcggatttaaaggtgcaccaatctttgcatccatggtagctcctaagaaggcaactacaaattctagagagtttggcattgatattgctacagtagattgtctaccaacaacattgaataagggggaggtggaatcattaaataatgtttgaaaatgacctaccatgctagatagctcacggtatgtgacttgaacattggtctctggaataacaacagcaacattgtcagagacgcggaaagtgtcgttaaaagaagcagtatttgtagcacctaaagcaaccattttcaaaagtaatcactattatttgtcaaaagaaaagaagaggaaggatgctttatagaagagttctttctatttgaataataggtattggtgattagtagactaaagtagttattgaataagattgttaagttatctatggaaacttgaaatggtcaaattagtcttccaagacaaaaaagaaaatataataaaatccttttttttgatctgtaacatgtatacttacacacacatatatacatatatatatatgtatatataccatagtttctttatttatcaatcccccccttcttgttctccttcgtgtttttcctttctatctttgattcttgaacgacttggaggctttgatcgttcaagaaagtttttaaaaaaagattccgccacggaaatgtgcgggaatataaaaaccaaaagtgaattccgtacttttttgtttgatacctgttttaaagctgatgaagattatcgtattccactgttcagagactattaatcaaccatcagctgataacgatatatatatatgtgtgtatgtgtatatttgtgtagaagcatttattgtaattgagttccatgaatggccctgttatagcactcatctcctgtgatcccctcgtcataaggtaataaaggtaaagtaaaaggaacaattattgaactatcagtgtctacattcttctttttagagtctcttgaataaaccaaatcggtaaaactgagacatggcacttttttatctttattgattcttgatttatgtatcaaaacaccaacttcataatttctgggtgaggttaataccttgccccatgcattcatactcaagtttgctgaagtgtaacaacaccagtccaactcttggaaaggactatcttccattcctttgttagtttcccacgtagctgtggtggtagtagataaataaaattttgaatgtgcgggtattggacctcttctaaaagacacatttcttgggctttgtttataaaaaattttaaacttttccttaagcatggaataatatggtatatttctttcatagtaaaaattgaaccagccttcaaccatcataccatgcatagagttctttaactcatttaatgttggatatacaatataaggatggattttcatgtcttcatatagttttaatagagtttcagtttctatatatttgattcttttgtcattttcatttattttcaatagattataccaagtagggatcattaaatgtgtgaaaatatttattggtttgtttctacttaaggaattacccattgaagaaatttgacaaagtaaatgttttgatatactgttgttagtattgttgttatcaattagcagtgatttttctaaaagtatttcatttaataattttaaacctgaagtaacttttttatttgttgttgagaagatgaaacttatttcatcatcatttaacggtgaaaaatcgattctttgtagattatagataattgaatgatattttatatctttaatattataagagtttaaatattttatcaaattcttttgaaacttgttctttttattaacatgtttctggttattctgataagttcgatttattggagatagtatgggactacaccaacaaacttgctgggggaaatttgtttcattgtatgtaaaattatttgaaggtaagaaaatccgacatgattgatctttatagaaattaatgatcatttttgagtggtggcatgaatatggtggcatttggaattcaataatatgtgtctttttcatcattggagcatacaagtttatagttaaaggaagaattgtaccagtttgagcgatcattgttacattattgactttgtgatatattttgggtaaaataaaattaagttcatattgaaaactgaaaagaatagttttttctaaattacaatcgtataaaatatcatctaatgtaataaaatgacgagatatcactggttcagcaaacatattattagaagtatcatatatttctgacttgattaatttaaaacaccaggaattattattgttattgttattattgatctttttcggtataaaggtttctgttattgataaattatgatccggtttatttattttattgttatgttcttcttctttatcacttgtatctattgttagatcaattatgattcgatcactattaactaattcattataattatcattagcattagtaataatagtaggggcagtagcactgttatgcattgttttgtctttaaggctatcgatctctttagaatttgaataatcaatgtttctccatctatttgaaacagcttcccttgcacttaaatagggcatcttattattttgtgacatttttttacttattatacaccttttgttatttaatattttcgctttgtttttgtacactagaaaagaaaagaaaaaatcacctaaagaatgttgctcaagtatttctcaatgtatatcttgcccatttatatacatatatatatatatatttatggtgatatagaatggccttgtcaattatttacatatttatttcactgcccttatggatagatatgaagaataaatatgatcaattttaatacccgttgatttgtgtatttttgtatatctgattataagattataaaggatcaacttgaagcagagaatggataaaataaaataaaataaatagcaagcttgcttaatgtgaagtgatagatccactttaccgaataattccttattatcaaattccatctatgtagattaatatttttttgtatgcataaaattgttttggtgataaatttgatctgcaaaaaaaaaaaagaaaaaaagaaaagaaaagcaaagaaaagaaaagaaaaatctatttatcaaacacccatacacctccatgggttcaaaaatttgtggaatttttttttcttttcttttctttttttgttttgtgttcgattcgttaaggaattcttttttttttcttttctgtcaaaattttgttttttgttttttgttttttgtttgagtcattgacaaatcatcctcccctgttcatttttattttattttttgtggggaacaatgaaaacttcggaatgcaagtatatattcacacatttaaatatatatatatgtataggtatatgtgtatgtgtatgtctgtttatgatttatatggctaatttagttgcaaaactgtttaaaggaattaaaaacacaatcagagattagttggtttgtttctttttttgatttttggtttttgatttttgatttttaattttagtttaatcattattttttttttttaagtttagatttgaaattgaattgaagaagtgacttcatttaattatagtatttgattcctcttattaaggaagatatttctctttttcactttctatttgcatatttatattgtcctttttttttttttactcttctttctaatacattcatattcatttattcacttccatcaatacatttacatacgtatatggattacatatatatctatatgtatgtatgtatgtatgtatttatctgtttattcaaactattgaattgttaagtcattcccattattaagaaacatgtctgatacaaacttggataatgatcttaaagatcccaataaacaagccaatcaatttataaataaaaataatagtagtagcagtaataataataataataataataataataataataacagtaacattagttcaaaaaataaagttagaattattgaaagtttgcatacttttgatatttacaatacagatccatacccatctttacaaaatgcgtctagtccagataatacaaatatatctttaaaagaacaattatccttagacccattaactcaagattttttaccaaggggtttaagaagtattcatggtaccacaaagagagtcgtagatgctaaaaattctttcaagagatgggattggaataagctgccttcgaaagatgtaaagtgtctgaaatcaatatcaaattataatttaattaatatagaaattgatgggcaaataaaacaattacaatatctgccttcttataaccccatgttgccagtattagacattttttatgcatttaataaagaatctaaaaccgttgatagcttaatattttcaaaacaaagattgaagtcgtcaactgaagtcatcattaacgctttgaagaccaattgcaaaacaactactttatcagaacagtccttaacaaatccttcccccaattccgtcatctcagataatgatatgattaatgaagattcgaatattttattgtcgttaagtaattcatctttaattaataattatactagtcccttcatcagtgatattttggaagatcctaaagacttgacaaatcagaattcaaattcagatcatcgttcagaagtggatattgttatccatttatggcatttgcaactacaaaaatttcttttgcaaaaaaattcattgttttattccaatgaggctttacaatccttattgaaaacaaaatcggttacaagaaagtcatcaaagaataatcagcaaaattctacatcagatactttgacgataaaagatactttagatcgatcacaagactttacacttgataagaataggttgatgctctcaaaacatgtacaagaatatcttgatgaaattgacattttggtgattagaccacctttagcatatttgacggggctacaattagcatttgatgaaccaagtctaaatgttgtagacttccaattacattcaatatcttggatctcaaagaatcttaccaaggatttattaattaatacaaatggagaaattaataaaaaatattcttcaatgatcaaaatcgtatctaatgaatctgagttggaaattttaactaaagagaacgcacatttgtatatggttaattgtttagataaaccatttgctgaccactacattgatattgacactgacagtgttgaaaacaagagtatatatagtgggaaatctgatagtactaatgaatatctactatccatgttgccccccttagcaaaaagagatagctatgatacgatcacctatgatacacatagtaatgttagtaacaatactaattttaccactgacacgaatatttttaatccattatatgttgagaaatccgataatgctataaaagaggagaatatagttcccaagaaaaaactatcttccaaaaaatcgagtattgtgaatttctttagaagaaagcatcattctcaggcacaatcacaggctgagcatacaaaagttacacaacaacaacaacatattaatataccgtcacatcgttcatcaataagtagccaacagttttcaagtattcccactgatattacatctggttattatcggaaaactccatcagtcaggaattacaattttccattaataagaaaatcatgcccaaataaaaaccttacattaaacaattcagcatcccatcaaacgttatggttggaagaacatttttgtgaacttcttaataactataaaaaagttgaaatgccaacgcagtattatttacctggggatgctaagtcacctctatctataaacaaaatatctgctgcatctttctcctcatcttcattgtccttaaaagatgatgtagaaaatattgataaaaaagtcaggagtagcaaatcttataatagacaatttttagaattacgattaccatttactgataattcgataccagcaatatattgcccatgggtctggggcatcctaccaagaaaaagatggcatgtcttgacaaaagaattgtttagaattctagaacatgaggggtatgttcttgctgttcaagctgatttgagtccgacaaatacaaatccaacgaaaagtaaattccagactgcgatatctagagaaaaaatatttgacagtgttgctattaatgcaattcatcaaaacatttttactcatcctacacagcatttgtcaaatatctttaaagaacatggatttactaatatcaaggcatcaactctaagtctaaaattaggagattgtgaaactgagatgggttgtttaaatgaatttgcatgtttgatggctattaattttacatttagacaagaaatggattatcaagaaggaacgaataaagatccaggtgaaattatagaacagtattataaggaacattggtctcaaattgataaccaagcgggtacattcagaatatcttatattgtagcacaaaaaccaaaaaagattactactttttaaaaaaacgaaaaaaatataatacatattttgttcttttatgcaataaacaccatgtttgaaattgataaaataacatttggtttcctttgaagttttgttaattcataatatattcatattttatttggcatatatatttatataaaatctatgtacatttctataatattcttttaaagcgtgtagttttctttttattactattctggcaatatttatagatcagagtggaggtggggcttttgatatttgattattgatttatgccaagcctttttcaggccgtctagtgtttttgtattgtgggggtccttctaaattccttgtcaagtaccttacccaacgtttcatcttctttgtacacatctcttattaaatcatctctttgacctctagaataatatttagcattaacatgtgaagcaagggaatattcagtctgttgtagggaattcacagtctcttcattaattagaacatatttgattccagactcaggacaatcataattgacgtttagtaaaactctttccatgatacctcttaaacctcttgcaccagtgccttcttttaatgcaaattgggccacttttttcaaagccttttcagtgacgcatagtctgacaccaaattgtttaaatatatattcatattggtctaatagagcatttttaggttcctttaaaatatggtacaaatcactcttttgcagtggctctagcgcagtaattattggtactctaccgactaactctggtattagaccaaaactaactaaatcagtcggagtagttagattaaatgcggagacttttttaccattgggcaattcaatttcttgaattttgttgctaaaccttaaattctttatttcttcatcttcatcatctttctttgaatcttttaatgtttcagatactggtttattttgacgttttaatttattaattcgctgagctacatgtttatctaatccaacaaaggcgcccataatcatgaacaaaatatttgaagtgtcaacaataaaactttcatcctttttaactgtctttttattattgttatcatcagtacttacttttactggtctttgtactactatttccactttgtgtccttcaataattttcaataatgactgttgtacaccttcgcctgatacatctttggttccaatactagcagcaggtttagccaatttatcaatctcgtcaagaacgatgatacctttttcagctttggctacatcaaaatctgcattaaccaacaatctttcaatacagacctcaacatcttcaccgatataacctgcttgggtcagttgagtacaatctgtgatggcaattggcacatcaagaactttggctagtgtggtagccaataacgttttacctgagccagagggaccaattactaaaacattgcttttactcaattgtaaatcgtcatcatcaaacttatccgaacttagactggggtttgttgtagacttaagattctccaattgtcgctggatattcttcaatccagcttcagcctcagatcttgatactaattcttcatcaaaatcaaatttatccttgttatcattttccttttgtaattgtttcaatttattggcttgctctgctttagcatttaactccaatacttttctctctttagctaattcttctttagtcaatttatcatttattcttaagtaatggttataaacagcaacacttaaaacttttttacctgtatcttgaccaattatatattcatctaaaaatctttttaaggcccgtggagatggtatctttggtatcttagatctatgtattgggtgagtaccaaaaaatgtttttgtgcttaatctataacaattagtaagtggaagacgacttcgatataatactaccattattgattaatgtaagatagcagttctagaatattgcaataaaatactatttttatatatttctataaaactttaatttataatatctcgttgataataataacaataatagtaataaatcacgttttagtaaaatgttgtttcatagggacaagtagaaataaaaaaatttctttttctttaattgttaattaaataactaataaaaatcctttcaatatgtctaaactgtacaagacatataattgacaattgtggccatcatcacagcccactctttttaatgtattagtaattattttttttttaattttttatttataaaaaaaaaaaaataatgttattgcgatgatcagtcaaaatttttgcttagtaaatgagcaaggttcatgctgactcattttgacaaataaaacctcttaaatggggtttggatctaccactaatctaagatggtgagtcagtatagatattcatttataagaggttcactatggcagataatagttgaatatttagttaaacagagattcccagtgacaaactatacaaatttgccaattgagcgataatatccatttgaagaatattgttagatgtcaggttttactcccttctattgttgttatttactacattcaattaacaagaagcagtcattttatattggatcaacaccaaatcctgaaaaacggttgcgacaacacaacggatcattaactcatggcggtgcatatagaaccaaaagacttggaactcgaccctgggaaatggtcatgtttgtatatggatttcctaacagaattgttgccttgcagtttgagcatgcatggcaacatggatatcaaactcatttcattgctcctgaagaaagagtaattaaacataagaatggtggtagatcgcttaaatataggttaggcgtcgttcgattgttattaaagaaccaattttttcaaagattggatctaaaagtacaattttttaataaaaatgctttacaatgttggaagcagaatgaatttcatattgaaacgccatttccgttagaagcagatatctctgatggatctttggaagatatgaaaatgacaactactcacactgtagatgatatactagattatgctcaagcaaatttagaacttgtaactaatttctataaacaagaaaaaaacaaatttgaaactgttatgattgctttctgtgatagcttatcaaatggatatcttaaatgtgatatatgtcaacaagaatttgactatatggatgaagattctacattaaaaccttatattgcattttgtcttaattatacaacttgtaatagtcattttcatcttgaatgtttatataagaaatatatatcagaggaagaaaatgtaacagagtctaaaattattcccacgggtggtgaatgtccaatttgtcatgtatcgatgaaatggacagatattgtgaaatattcctgtggaataaaatgtaaatatggtgaatgagagatagcaatttctatgattttagtatatatatatatatatatatgtatgtttgtgtgtgtacatgcattaaaagtatgaattaagtgacgagttttggtagaagtggggttttttaaaaaattatttcccattcattttcaaagtaaacgagtggattttgtattattattagatgattctctttagtaacatcaacgtaccattctgtttcattttgttttactttaactcgttttcctatactaagagtacttttttcactagttggaataatgattgtttcaatcaatgtgtttccaaaagtagtacgaatattttctgataagtttggaacatgatttggttgatttttaataatgccattatttaattggaaattagtctccaagtattgaccttcttcatattggaaagatttaccatcatccacatataacttcccaaaagcttccctgttattattaggtgcaattacaattgtgtatggatcctgtaacattaattgtgaacttcttctatatctatcttttcttacaataatatgtcctccctcaatgaaagcaggtattttggacaaaggaatattcatattaacagcctgaatattatcaccagatacaacaataggttctagactttctaaatcatagtatattccaggagctaaaatcattgaagtgtttcttgtattagaggagacaattggcttcacaactatacccgaatcacttagatagaattggtcatcgatattgtacatttcaataaaagtagatttttcataaaacataggacacataattgggtagccagtgatactggctttgtgaaaagcggtgtaaaaagttggcaataatttgtatcttaattgaattgcatttcttacaatatttttaactgtttcttcaaaaaggtatggttctcttctttttgtatcaatatgagcgtgagctctaaagaatggataccacaaaccagcttgataccaacggacaattaattctggatctgggtcaccagaaaacccagctatatcagcaccaataaaaggcatacccacaatattattagttaaaatcatagggatggagattcttaaataatcccaattagctacattatcaccagtccatgaaccggcagaacgttgtgaaccgacgaagaaggatcttgttaagataaatggtctggttagattcttatatatttctttaactgctttgtaagtagtctcatgaacacttaatccatataaattatgaatggatctttcttctatatctctatcatgtaaaagattctttggtgcagttgtctctggaccggaaaatatagaaggttcattcatatcattccaaaaatgcaaattattccaattaatatcaatctgtggtaaccatttattaatgaaatcgttgaacaaattagaccaatcaaattgtccaagtttactaatagtatcaatccaaattgatctacctggccaacaatcaccaaagaaagttctccctacatgatccctaacttgactaccagacttgactatctttctactaacctcatatttagccattagatgtgggtcaatcaatattactaattgtctacctaatttatttaatttttttaggagtcttgttgggttgggaaatgcatctagattccatgtgaaaaattttttttgatcagtgtattccaaatccaaccaaataaaatcaaatgggaaatggccatcatccatgtttttttgtacgttaagtacgtccaattcgttgttataattccatctacattgatgatgaccaatagcactaagttgtggtaatactggtgaccctgttaattggatatactggtttgtaatatcctttggatgatcaccaaaaaatagagtaacatcgattattccattttctgagatccaatgtgttttagtgtcattaagtttattgtggtaatggtaattgatatcgatccaggtgtctgatgggtttaaccacaaaatacccatagacgatccaggtctagcagcgatcataaacggaatggagccatacattggttgttttgaatcgacattatactcaaatacatcagtattgaaaagtctataagggtcacttgtctttctctgtgaggaagattctttatcttttgaaataacagtattagtagaagaagtatcttttaatttcaaagaatctgcatgttctggaattccgtaaacattaccataattaataaaagtgaaatcgagagcaacagattcagggcctaatgggatagtatctgatttagaatattggaaatcgtcagtaaacatattgaaggtggattcaaagggtaagacattttggtcattgttatcgatacgtctgtaatgttcccaatttaatagatatctttcattaacgatgatttctaatgtatctttataataaaccatcatttggaaatctttgacggttaatttaatcttgatatctttgaatttatttgcattttgaataataattacttcatcatcatctccgtgttttgaggaaaaccaaccatgttttgagctttcctttgaaaattcccagtgtaatttattactagataagctagtgttatggtactgaaggagtgtagcccaattccaagtctgattatacctttgacaactaactttttcttcagtacaattctgtcttttttcatctatggtgaatctaatagcactcaatggatcatttaaaaggtataattgaagaggtaaaatgatgtcaatgtcattgacagttttaattaaattagcagtaaaaacattatcttcagttatttgaatactttgtttatctaaagtataaatacctttatgcaaggatttggcttgttctctagcataatgtctatttctatgacaaaatgaatccttatcacaatcttttaatagataatcagtgaaagaatatacctttgagaatgatattattaatacaaggaataatttgaacgacaatatattcataattccttactttttttcactcttgttcccttttttttttctctctcctattctttatgtatacgtatatggtatagtatgtatatatagtgataatggttttatttgttagctgttaaatcgtgacaaataaaatatccatcagatatatatatatatatatatatatatatatataaatgttggaagtaggtttaggtaaatatttgaaaagtatgtagtacgggattttcttaataaaagatctgattttgtttttatttttttttttctatttttctctttattctttcttttcttttctttacgttattttacttaaaaagggtaatgtgatcttaaaggtagtgtcattaatttagtaaagtttccataaaaagtaatagaagtaacaaacagatagaaaaaaaataattttaaacatagacacataatatatatgtatatatatgtgaaatgctgaagatatagagaaggagagatatctttctgttgttttcttttttggttatatatatattaagtttttttgataaaatattcattaagcagataacaatcaacagaaaggagggcagtactgccgaatagacaagtccaaataaatgaatttggtttccccattaaaaatcgtttttcatacttaatatatcctatcaataggatagatattaaactaagaccaaatatagtattgatcaaaattattggattcttcaatatttctactgtatatgatagtgtgcttaaagtatttgaatatgcattgtttaaagtagttgaaagagaattttttgttgtttgaaaaccattatagagaccattcctaagagttttcagactgttaccaaaccagttccaactccgattattgtggttattgttattatgattggttgaatctttagaagatttgaagtttttttctatatcaaaattttgttcttttaatcttgtggtctgattaattgggtcagaaatcttagatccaccagacatatcttttacaattaggtatattgtataagtaaaatctgtgtagatgtatacatatatatttttattgtatatgaataaactattatgtatttgaatatttgatagatcatataaattcaaaaaaaaaaaagtaaaacctagaaaaaaaagaatatacaaagcgtatataaaataaatgagttaaaaaaaaatctgatttacatgtatatatatatatatatatatatggatgtattataatttgttattccttaaaaaaaaaaggcattccccttattattatctttcaattccttcaatgaaaattatttagaagtaaaattggttttattcaatgcttaaattttttatctaatataataatagtgctactacaaaatgtgtctgtgtatatcatatataatgataatatatagaagtagatttatttacattggtttattggtttattgattcattgattcattcatccttgggatgaagggaaagagaagaagaagaaaaagaaggaggaggaggaggagagggagagaaaagatatttgagggttgaagaaagtttttgtacttgctgatagttttgatgttagggttgtggaaaaaaataaaaagaaaaagaaaaagaaaaaaaatttctgataaaacaaaaatttatggaacaatatgttggagatataaagtagggttcattagaaaatacagattgctacccataataacaatctattttttttcctttctttttaaaaaaaataaaaattttttctttcccttacgtctttctttttttgtctaaagggaaacgaaaattcccctacttttatttattatttaaaaatagagagagcgtcaatgacgtcagagataaaatgctacaattggtaaattaggggagagtcattttttttctaattgtattagtggtattgtctgaaaaacgtttttttctactgttcgataattataagaaaagaaaagaaaaagtaaactaaaacacattatcttccatacatagatttactaaggtttatgtctctttttttttctttatgtgtatctatatatatatatatatagatgaggtattgttttgttataactgttgagaatgagcgcctttattcattggatatatagtaaacattctcaatattatattaaacagatttagtatacaaaattataataaagttcttcactttttttctctatatacaacatagaaataataatatagaaagattgtaaataagataaaaataatgtatgatgaaatccttggctttatatatgttaacattcagccattttcctctacgaacagtaagatatttaataaacaaactcaacaacctttggtgacctctcaacaattattactcgacaatttatcgtttattgtctgctaaaatcttattgttctatctatttcattatagaacattttatttcaacaataactgtaacttataacatagtttctgtcaatcaaattttcctttcatggttactaaacaagaggaagcaattcattatttttttttatgtttacgtggtatctggaaaaattgactatgatgcaaaaaaaaaaaataataacataaaaaatatcgtaaagcgttgtttctaataatattaaaagaaattataaaaattatataaactttgtattattcttaggaagtatgtaaaggtagatattaacaagttatattaacctcagaagtctaagatttaatttttaccttctctataatatataagatgtataaaagaacatatgatgaacttaggataacttttctcctaaatgagatactgtactacaaaataaaaatcttacacaatggtcaatgatgttaaatgttgatcctactatatgaggttggctcccaaaatgtaagtaactaacttatctttaccctttaacgattaataaatatttaattttcaagttttcatatcccagtcctttttatctaaaggtatattcaagtatttcttaacaagattcatggtagttatagcatcaatagcactatcatgttcccccatctgaatcttcgtacctaacatcttaaacgctaaatcctttaatgcttgtttatatttatcctttctaagaaacattatagaagtatcaatacatttatcatggatcaatcgtatcacatttaaatcattttcaaacccatgcccaattaatatactattcttgtttatcatcctaggtcccaaaatctctttcaatacctcctcataagatatcgaattgtctttattaatctcatagatcccactataccttgaatttaaatctattatctctccaataggcctggttaccttgtcaaataatacccggctcgtgaaaaaatctatcatagtcaatcgtatcatctcatatcctaatgtcgtaaaccccatctcacaatcaatagatatcacatttgtctccccatcaactttttctgtatccacaaatggcgatattttagataacaagctatacccttcatctttaaagacatgatgttgaaacacttgacaacccaacctttgtgatgaaacagattcactagtctcaccacaacatggatactcatatatttttttatcgaaattatatattttcttcgatggatgatatttacacataacttttctttttatgtctgttcttttaaatttcatcatacaacgagaacaatcaacatacagagacctattcacactagctgtatctctaagttcaccaacatactcgtttacttgtcttctagtaatataactgtttctactcatttgatcttcatcaagaaccaatttgtttaattcttctaatatattgttaacattccttaaaaggatagacgagccagaatctatattctcaattctatccgatctattattaccaggtatcaatggtctaccagcaaccacaattttattaatattgcctttatgtttaatgaaatcacggatcagtacattaatagtaaatctataaccttggttgcttttactcaacttagctacgtgtgcttctaacatcactgctaatttaatccatctttgtgaatgtttctctcctttcaatttcaccaaatgatcatacagtttatgaacaatcttatatctatcttgatattgagcaggttggttgactagatcgactggtcttaacgatgtttcactcattttaataattactattgtttgctatataagatctactcttcttcttcccttcccttccctcttcacttacttccattaaaaaaaaacaacaaaacaaaattcaatatatacatgaataatataaatgcatacaatagttatggactaacaagtgtaaataaaactataagatagaccttcctatcggattttatttcaagttacactattccttctcttttctgcttcaatctctctttatttcttttgatctttcaccctttttgtgatatcgtcaaaggcgacctcatcgcttatccctttttttctttttttttttttttttttttttttttttgagaaactttccaaataaaaaaaaaattttttttttcttttttaaattttttcatttttagagatgagatgagttgagaaaagtttgtaactcttataaataaatcttaatcgaataaaagtttaaatcctgctaataaattaactttggatatataaaaaggatttattcttttactttaaaattcaacattcacttgacgtgcgagacatctacacagtatttcttagttgttaaccttgggaagatttttatacattattatcccccccttcccctcatcccaaacatacacaaaaagaaactaaaaaaaaagaaaagtcaagaaggcatctaataagtttattttatatatttattactgctgccgttcaaatagtctatttagtaattttttccccttccaatattttatttgaatactggagttttgtgtattatttttttcttttttctttttttccagctatatttaatctctctctaaactgtaggaataataatgtctcctgatcaaatcgtcctggatttagatgctataagggagagatttctatttttcaataaaaccttccctaaggaacaaatagacgatttttaccaatttaatacaaataaatcaactaaagaaaatttgtctctgttatcaaaagaaattttgaacactccatttacaacaaattatcttttcgcttataaacctatcttcttagccattatagcacattggacatcccgaactgatgataatgatcatcttttaaaagtcttggagtctacctccagaataataagcctatatccaatctcgagaactataattgaagatttcttatccaaaaacaatgattttttcatcactattttacagaatccttctactcaagacaacatcagcatttttaaaattcttttatcctactatcgattagtatatcatgataataccgtttttattaactttcttagacctgatgttctgtacttcatagtcgaacatcctttaactttaccattgactaaatttctttccttaaaattactatccatttatttacaattgaatgaaagtgggtccattgatttgtttagaaagtatttagattacaataatcatgatgtattttgcggtcaatatgacacgaataaatatgcaaattataaattcttagaattgaatgaagccaaaaggttttccaattttacacttttacctgaggtaaaggaatgtttcattaattcaaagatcacacataccaagagctactttattatcaacccttctgacttaaatagtaatgttgtgtctattggtggtgttattgtacctagagttcatattacaaataatgttgaaaatcaataccctcccacatttgttccaactttgaaaactgtaactgcgatacgtcaattggctaaactgttacaaaaatcagatccaatcatgttattaggtaaatctggtagtggtaagacatttttgattaatgaactaagtaaatatgttggttgctacgattcaatagtcaaaatccatttgggtgaacaaactgatgcaaaattattaattggtacttatacatctggtgagaaaccaggtacttttgaatggagagatggtgtattgacaacagctgtcaaagaaggtcgatggattcttattgaagatatagataaagctcctactgaagtgttatctatcttactatcgttattagaaaaacgtgagtttactataccttccagaggtgaaacagtaagtgcaggtaatgggttccaattgatatctactgtcacattaactgaagatatgatcaaaaaaaatagtacagctgatttagtagccaataatttcaatttgaatatgataggtatgcgaatttggaaaatagtttaccttgacgagccatcagaaaaggatttaaccttaattttaactaaaagatatccagtattaactcaactgataccaaaacttatacattgttataaaactgtcaaatcaatatacctggatccaagattcgtttcattaaataaaggtgcacattcacgcgtcgtttccataagagatttagtgaaattatgcaatagacttaatacccttttcaaaaataataatatccacaaacctgatcaattgattgagtcatctatatatgattccatttttgctgaggcagttgattgctttgctggcgcaatcagtgaatttaaagctttggagccattaatccataacataggtgaatctcttgaaattgctaattctagaatatcattattcttaacaaggaatacccctaaatttgaaacttttaatgatcatgtgataattggaagagctaaattacacaaatccactttgtcattacaaaagaagtctatcaattctacatcttttgcatttacaaaccattctcttagattaatggaacaaatttctgttgctgttcagatgactgaaccagtattattagtaggtgaaacaggtactggtaaaaccacagttgttcagcaagttgccaaattaatgaacaaatcacttactgttatcaatgtttcacagcaaacagaaactggtgatttacttggtggatacaaacctgttaattcaaaatcggtggctgttccaatacaagaagagtttgaaacattatttgctgccaccttttcaattaagaaaaatgaacgtttttataaaatgttacataaatgttttaataaaggccaatggaaaaatgttgtaaaactttggaaagaagcttacaagatggctcaaaccgttttaaaaaaagaagataaaacagcatctgctgttgatgaaaacaggaagaaaaagaggaagttaaataattatcaaaaagaattacttttgaaacaatggtctgaatttgacaataatgtaactaaatttacagcacagtctagttctctcgaaaattcatttatatttaattttgttgaaggttcccttgttaaagctgttaggaatggtgaatggttattattagatgaaatcaatttagcatctgcagatactctcgagagtatatctgagttgctttcagacacctcttctagaagtattctactgtcagaaaaaggtgatgcagaacctattaaagctcatcctgattttagaatctttgcttgtatgaatccggctactgatgtggggaaaagagatcttccaactggtattagatctaaatttacagaaatatatgttcattcccctgatcgtgatattactgatttattatcaattattgacaaatatattggaagtttcagtgtaagtgatgaatggatcggaaatgacattgctgaatgctaccttgaagctaaaatactttcagaaaataaccaaattgtagatggttctaaccaaaagcctcattttagtattcgtactttaacacgtactctactttatgtacgagacattgttaaaatttatggtttacgcagatctctttatgatggtttttgcatgtcctttttgacactattagacgaaaagtctgccagtattcttgaacctataattgcaaaatatactattgatagattaaagaatgctaggtcagttcttcttcaaacaccttcatctcctggcccatcctatgtacaatttaaacattattggatgcgtaaaggtcaagaacagatcaaagaacaaccccattatattattacaccattcgttgaaagaaatttacttaatctagtaagagccacatcaggtaaccgcttccctatcttagttcaaggtccaacatctgctggtaaaacgagtatgattaaatatctggctgatataacgggtcacaaatttgttcgtattaacaatcacgaacatactgatttgcaagagtatctaggtacatacattactgatgatgctgggaaattagcttttaaagaaggtgttcttgttgaagcattacgtaagggttattggatcgtgcttgatgaattgaacttagctccaactgacgtgttggaagcacttaacagattattagatgataatagagaattgtttattcctgaaactcaagaaatagtacatcctcatccagatttcatgttgtttgcaacacagaatccaccaggtatatatgggggtcgtaaggttttatcccgtgcatttaggaaccgtttccttgaattacactttgacgacattccccaagatgaattagaaattattttacgtgaacgttgtcaaattgctccatcatatgcaaagagaattgtagaagtttatcgtcagttatccgttgaaagatctgctactagactatttgaacaaaaaaatagttttgctacattacgtgatttattccgttgggctttgagaggtgctgtaggctatgaagaacttgctgccaatggttatatgttattagctgaaagatgtagatctcctcaagaaaaaatcactgttaaaaagactttagaaagagttatgaaggttaaactagatatggaccattactatgaaaatctagaggatccaaatttacaaaaattaaattctgttatatggactaaagcacttcgtcgtttagctgtattagtcaccagctctttaaagaataatgaaccagttcttttagtgggtgaaacaggttgtggtaaaaccactgtatgtcagttgttggctgaatacacaggaaaaaaactaatcactttaaatgctcatcaaaatacagaaacaggtgatattcttggtgctcagcgtcccattcgtaatcgttcagaattacaacatcaacttatttcattgttacaaaacatcttaaataaacctgagattattgatttagatagcttattagtagcctatgatcatttcgacaaatcacaactctctgaaaaccagcttcaagatgttaaacagttgaaggaaaatttaaatgttttatttgaatggaatgatggcccattaattcaagctttaaaagaaggtaatttctttttgtttgatgaaatgtcattagctgatgattctgtattggaaagattaaatagtgtattagaaccagaaagaagtcttcttattgctgaaaagggctcatcagacaattttgtgactgctaaagatggatttcaattttttgcaacaatgaaccctggtggagactatggtaaaaaagaattatcccctgctcttagaaaccgttttaccgagatatgggttccttctatggaaagttttgatgatgttgagctaattgttaagtgcaagttaaaaccttctataagtgaattaactaaatctattgtaggtttttctgaatggtttggtaagaaatatggtggtggagatgcaactagtggtgttatatctctacgtgatattttggcttgggttgaatttattaatagtactgacaataaattaaagaatccagctgcacaattaattcatggtgcccttatggtgtttattgatgcattaggcactaataacactgcctatttagctgaaaacgaagtaaatctaaaaagacaaaagacagagtgtattgacaaattaagctctatttttggtgacgacttatccatttatgttaatactagtaataagtataatttggataattcagatatacatattggtatgtttagatatccaaaaaattcaggtattgttgaaggtactacttttactattgatgctccaacaactgcaggaaatttgatgagagttgttagagcaatgcaggttaataaaccaatcctgctagaaggtagccctggtgtcggaaaaaccagcttaattactgcattagcaagcctaacaggaaataaactaacccgtatcaatttatcagaacagactgatctaatagatttgtttggttctgatgctccaggtgaaagaagtggggagtttgtttggcatgatgcaccatttttaaaagcaatgcaggaaggtcattgggttttgttagatgaaatgaatcttgcctcccaatcggtcttagaaggtttaaatgcatgtcttgatcatcgtggtgaagcctacatcccggaattagataaatcattctctagacaccctaatttcatggtatttgcagcacaaaatccacaatatcaaggaggtggtagaaaaggtcttcctaagtcatttgtaagtcggttcactgttgtgtatgttgaaatgttgactgcagatgatttacttttaattgctaaacatctttatccaaggattgattccaaaataatccagaatgttatccatttgatatccgaactagaagaagaggtaagtaggaaaaagaaatggggtatttctggatcaccatgggaatttaatttacgagacgcattaagatggttaaaattgcttggtaaaaagggtatcacagatgaaataactatttatgacttttttgacattattatcaagcaaagattccgtacggaagaagatagagcaaaggcaagttctttattgaataaagtatttggtaagagttcaaagaaatcaaattattttggaggtcacaccaattatatccaatttaacaatgcagttgctaagagaaatccccaattcagttttcccttagccaataaactttattctttagaatgtaatattgaatattatgaatctgcattacgttgtatttcaaataactggccacttatcttagtaggtcctacaaattcgggtaaaacaagtttggtaacatatttagcttctgtccttggaacacaagtggacatattctcaatgaacaatgatgtagacagcatggatatattaggtggttatgaacaagtcgatttgacaagaaaaatatcctcgttgactaatgaattaaggatatttttaaaaaatattatatttaccaacctaaaattgggtgatacaaaaactgaagaaatcaacataagtttgcgtttattacataatatatcggaacgctccattactgagcaaactttcgatcaattttatgccttattcaaggatttctatagttgtgtcagaaacaatatcactttgaataagatttccgaacaaattgaaaaaattaaacatttaacagacaaggttacagcagctaaatttgaatggtttgatggtatgctagtgaaagcagttgaagagggtagatggttaattttagataatgccaatttatgctccccatctgtgttagatagactaaattcgttgcttgaaacgaatggttcccttttaatcaatgaatgtagtcaagaagatgggcaaccaagaattttagaacctcatccaaattttaggttgtttttgacgatggaccctaaatatggtgaattatcaagagcgatgagaaatagaggcatcgaaatttatatggatgacttgaataacagagcaacagcatatgacagaaggtgcttaggctttacaagcaaaacaattataaaagaacaagaagattcattatcaaaagaactagattctttaagcatcaacccaaatagtttaccaaagccactaaagtgctttattattccatcgtgtacacttgcatactctttttcaatagtacatgatgtaatattatattctactacaaacacctcaattaatgctttggctggtttaattacctttgataacttaaataacatagaaggttggacttcgaatgtagttaagattaatcactatttcaatgactcaagagtttctggtatttttgactttattcacttcctgcatacttcaaaaattctggaaaaattaaatgatatctcactagcaacagaaaagaatattcattttataacctcactggaaaataacactgtatctcatcaacaattaatgctaccactaaatgaattcttaacttcagaactaataaaaaccacacctttagcagtctcagcagaaattatttatttgtttagtatattagagaaactaagacatttacaagcatgcatgattactatcgaaaaaagatcaaaaatatgtaaagtatctgatctttcttatattgaaaagtgtgctgctatattgaatggacgtcaattaaaagaaataatacgaattcctattttttcattattaaaaaaccttttacaatttattaaccacagtatcgtttcaaaacctttgtttcctacaaatttgtattataaattattttggttactcatcgttattttagaaagtatttatgattctgcatctaaaaaggatgaggctcgattaagagtatataaagaagttttagataattggttggcatctgctacacataaagaggaactggaaaattttaaagaaattatcaacatctttgatggttcaataaactcacaaagaggccactctatgagaatactttgggaacattttaggattacataccctcagacatcaaaaggatggaaattatggaataatatcgaagaattatgtgctagatttgacaaagtaaaaatgcaacagtttaaggaatctaatcaatcaattgttgcaattattgtgacgtttgctgagttagtggatgatgttttgaagaataatgtgacagatgttgaacttctattcaccaacttaataaaaggtattaataatttagaggcaatttctaacagatttttgaatagacgtaagcatttctttttaaatgaatttgatacccttttaagaatccagtcgctatatcaagaaggtttatcatcaattcttcaaaatatttgctcaaatgtaagcatatccactcacaagcaaattaggctaactgcaagtgatcacgcttatccacctgtattcgatcttctatgggtgaaacaaggagataagtacatctcacatacaagtgatattataagtgctgcatatattcagaatataatagttaagacgaatacatttgacaagtttagtggcagtcatattgaacaaacactaagtgatgctaaacttcttttgacaacaaccattgagtcatctaagtatctcctgaaaaatcatatttatgagttgggccgtaaacttctagcctggattaacataatagtcaaacttcatataaacgttgatatttcagaaattaataatcaagagataatgatgctgttttcttctcctgaaaataaacatatagatggggtttatcaaaaatatttaaaacctgcattggatatattaaatgatatcaataagagtcaccttctaggtcaggcgtggattttattcggtattgcaatgctaatattgtattcccctgatgttccatatgatcctgctgtacatgattatgttttatatgatatatatatgaaacatgtcaattattctaaaagtatgatcaactcgtgggatgtaattaataaagtgattagtggagatgatgaaattctagtgaaaaaattgattgaaattccatcagatcaggatgcaccaaataaaccaagagtttatcgttcttcgttatctgttgacaatttaatcgatgaatggtcagtttttttctcttctacagtcaacccagaaagactatctgtaatatttccttctgtgaataaatgggagcaaatgattgacggtgagtttgaaatgtttcaacagaacagttctaatttcttaaatagactcaactctggttatcaagcgtttacagatcttaatgatatttttgctggctatgtcttctgtattaagtttggatttgatttgatgaaacattcaataaaagaaaatgaaaaagatactaatgtgactaatttatggcctgttgatattctacaattaaccagcaacaactctttggttaacacatttactgaactttcaaaactaacaaaatgcacatcggttgatgatttgatgagtgaaaagaccatgatatttttcatggatattttcaaatatcataagtgcagtaaaagattatatagtatgtttgataatgttttacaaactttgtattatagatggtctttaaggagaatgaaagaagagcaaaagtcgatagaagaatcatctatttttaaatatgaagacaagactgaagatattgaagcagagttcagagaaatgtttcctgattatgacagtgcactttcatttgaagaaacaaattcttttaagaatgtacaacaaaatgatttagaaaaagtatatcataagatagctacaatatacatggaaattttctcagaagaaaaatccacttcgattgatcaacttatcaaatcaggaagcaaacttgtggatgtatttattaataacacacaaaagttgcttattggacagatttctcctagtttattaatgtcatcaattactattttgtacgatgaaataaataaatacagtggacaagatgataatgaaaatcttgatttttaccacgattcttccgttgtagaggctaaaaaggctgctacaattatcaataatatttggttgaagatagcttcattattacaacaatggcctgaacatgcgactttaaatgacttgtacaggatatgtgaagaatttttatctttttctgtagatatacctttggcacgtcaattacagaaaattgaacagatatacacattcatgactgaatgggaaaaatatgcagcctcttatgtatctctatcaacattaattggtgacattacaaatttgattgtatcttggagaaggttagaattgcacacatggaaaggattgtttaatgcagaggagaagaaaattgaaaaatctattggaaaatggtggttcaatttatttgaagttataattgccacatgtaatgagaatgaaaaggatgaaaattctcagttaactaccctattaagttcattaaatatcttctttagtaagagcactgttggtgaatattctactagaataaggttggtcaaagcttttaccaaccatttgcaatcctttatgccatctcgtttaaaaaccgttgatgcgttagccaatattttatcattttatgaacagtttagtccatttattacagattttatttgttcgaagaaaaaatcattagaaaaggatatatctgaggtaattctgttagcaagctggaaagatgttaatgttgatgctttaaaacaaagttcacgtaaatcccataatagtctttacaaattggttcgtaaatatagaagtgttctttcgacaaatgctacatctattattgaagcaggcttaccttttgatcataagtttaatttacaaatgaagccattatttaaaccatcttttcttgatattgatcttcaaaatgctaagagggtggtgaatacgattcctggatgggacaacagaataaaaactttaagaaacattgatttggttaagaaaaatatggaaaattattatgttaaaattaaatcgcaatcttttcctaattttgagcagttagttagagattatgcgagagaagctgatagattacgctctgaaaccccaagtgtttacaagaaagaaatcaaaaaacaattagcagcgttgaaaacacaaaaaaccaagttattgagtgattctttaaaagaattaagaagaatcggtttaaagacaaactatagagaagatatacacaaggtgcagggaacagttacttctattttggctaactcatcatctttcaaaggtactataatggaatcgtccgatgggtattacttcagaatcttagatatgttaccaaaacttagaaatgctgttgctaatccagcggctgatgttcctatggcaagcattgaaaagggtatggctattatggaaaacctattattttcattaattacaaccagaaaagtaatggtgactttggctagacagtttgaaaaagttgctaatatcatagaataccttgaatgtatttcaacttcaacgggctacattaaacaatcttctttacaagttgacgtcaataatgtacgttatattagttcatggttgcccaatatcctcgaatatgccacaacgaatttaactattattggattattttctgaacagtcactcgatacaagtttacttcttcaaactactcttcgcttaaaggagtttcgctcacgtattgagaaagttcaagtctttgattcacagatatctagtttaatctcggattaccaagaatttatcaacgcttttcttgttcaattaagatcaagccaaaattcgtactgtttttttgtctataatgtcattgccgattggatacaacaaaatacagaaatatctgtcaaggatgaagaattctcagaacctgctatccaagattttgatcaacttttccgtaaagtatatacaactattatcttagcattccaaaaactgatggaaaacgattttgcctcagttactgaagaagacgacaattggttagcaatgaaatccaagtctattgtatcgttgattaaatcattacatacagctaaagtaatctataacttacaatgtatcaccagtttaattgactcttctaatatctcagttacaacatctattatgctaagggcgattactacatttactctacctgtaatcaatcaatattttagtacattacaatgtattatggaaaaatcaagatcttactatgttgatataagtcaaggttcatacattttggctaacatattacacaatttagccaaaaatgggttctgttcaccacaacctccttctgaagaaatagatgataacaacttatatgagggtacgggtcttggtgatggggaaggtacacaaaacaattctaaagacattgaacaagatgaggatttaactgaagatgctcaaactgctaatcaagatcaaaaaaataaagatgatagggatgacgaagatgaagatgatgctgttgacatggaaggcgatatggctggtgaaattgagaacttgtctgatcaagatgacaagaatgatgagaatgatatggaagaagaagatgaattagaagataagattgatgaccttgatgaagatgatccaaacgctgttgatgataagatgtggaatgaagaagcagcagaaagttctaaggaaaaagagacagaaaatcaattagactccaaagaagagaatgatgttcaagctggtgatgataaagataataatgcaaataatggtgaaaatgagagccagaatgtggaggaagaagatgaaatgaataagaatgaacagaagccagatattgaggaaactaaaactgataatgatagtatgcatgaaaaggatggcgatgagcttgaagaagatgagagtgctgatgaagaagaagatgttggcgaacaagaagacgaagtaagaaatgaagatggtgaaaagatggatgctgctgttcctgaagttgagacaatggaattgcctgatgacttaaaattagattctgacgatgaaaaaaacactgatgaggaagttacagatgatgatgaaatgaaagataatttcgataagatgaatgaggatgaagaagaggaattgaatgaagaaaatattgatgctgtttctgaaaacgaaccagattccatggatattgatgaagataatgatcatattgaagatgaatctatggaagttgaaaacaatgagaatgaagctggtgaaaatgacaatgatgaaaatatgtcaaatgaagagaatcttgataatgagagtgaggaagaattaggtcaagatcaagatcagttgattaatgaaaagcaggagcttggtggtggtgataatatggataatctagaaggtttagatggtactgaagatttattgcaggaagagtcaacagatgtaaatgctgcagtacaacaacagtctggctctaagggatcaggatctacatctaaggatgtagaagaacaagaggacattggtagttctggtaatacacaaaatgcatatagagaagaacaagaaaaagaacaagcagataatgttgatgacactagggaggaagctaaagaagcattgaaacaactcggtgatagtttgaaagagttccatagacgtagaaaagagattaaagagatgagtgagagaactgaagaagaacaagaagaaactgataagaaggctaatgaacgtgctgatgattttgaacatgttgatggtgctaaaactgaaactgatacacaagcacttggtgccgctgatcaagatgaagtacaggccattgatgaagataaagccattgaagaaggacaagaagagcataaagaagatatggatcatgatatgctgcaagaggaaaatgataatgaaagtgaagagcatctgaatgatagattagattctgaacaagatgaaaatggggaattacaagatggtaaagttggtggtgtattttcaaaccaaagggatgaggatgttgataatgacgattcattgaataagaatggtaataacggattgattgaagatttttcgaaggaacaagaacaatatgaaaatgagatagatatgttattagatgaagtggataataaagtgacagaagaaaatcaatttgatgttccaccaagagatattgatgaagctcgtagaatatggaatcgaagtgaaatctctacaacagaactagtatcaagattgggtgaacaattaagattgatcttggaaccaacattagccacaaaattaagaggtgattataaaacaggtaaaagattgaatatgaaacgtattattccatatattgcatctcaattccgtaaggataaaatatggttaagaagaactaaaccaagtaaacgtgattatcaaatcatgattgcactggataattccaaatcaatgagtgaatctaattgtgtgaaattagcgtttgacagtttatgtcttgtatcaagaactctaacacaattggaagctggtagtttatctattgtgaaatttggtgaacattcacgtgaagtccattcatttgagcagcaatttagtaatgaatcaggtgtaaaagcattccaatggtttgatttccaagatacaaagacagatgttaagaaattagtggctgaatcaattaagatctttgaaaggtcacgcagtttatcatctaattcagatcaatggcaattagagatcattatatccgatggtatttgtgaagatcatgagactttacaaagattggtacgtcgtgcacgtgagaataaaattatgcttgtatttgtcataattgatggtattacatccaatgaatctattttagatatgaatcaagttaattacgttcctgaccaatatggtaatcctcaattaaagattaacaaatatttggatacattcccatttgaattctatgttgtggttcacaacatctctgaattacctgaaatgttatcaattattttaagacaatatttttctgacttaacatcttcataaaataataacatatcaagatatgttgtattgttgtacaatagataaataagaattagcatagatttataagtcatatatatttatttatgtaactaactgatgtcgaatatagcttaaatattaatagatataaagatatcaataaagaaaataggaaaatcctaattagttcgaaaccctaacaaaaaataatcataccgaagataaaaaatattattttctattgttgctgaatggaaaattatatataaagagaaaaaaacagaagaagaaagtgatgaaatgctaataagatcatcctacatcaagacagatcgcactgaatttgttacatgggattgttaagtcgatagaaactaattatttgttctacagcaatccactggaagctttctttctccctttttcctcgtgtattagtatagaagctactcctggatacctggatacatatagtaacatgttgttaacagagcaaacaatcaacagccattgctgtaccgttctttgtgtatgcctgtgttatttcctgtaattttattcatttttttttctcttttcttcatttttttttttatggttataaatagaaaaagaatcatatggctctattgaattatgtgatgataactttgacttattgtgactcgaagacaatattgtgttgtcagtgtgagcacaacgatttctcaaatagactacaacggtatctgataattcatatagatcaattatatactctaacgtacacacatatatatatgtatatatatatatatatatctggatgtacttgacttgtaacatttttgtcttgccttgttcttttttgactttctcacatattttatgttaattggctactaattttactttactttatttttgttcatttttgggctttctttgtcttttgttccagtccatgtggttcgtttctctattatgggctgtcgtagaacttgccagaatgaaaaattaagtgcaaatatcgttgttattattgaaatgcaattctacttgtgatgagtagttcaaaaagaattattctacaaacagataggcaagctagatcaatactaacttacttattgttgtaatatattattagcagcttttttccctttcctcttcccttattcttgtcccatttgctatttagaaatcttcccatataatggctaaacataattcaagattaaataatgttagatacaaatatcctttacctattcatccagtagagactacattacctttacctgagttacttccacataatccgttttcctggatatattggttttataaatactatcgactggtgtatagtaacaatgaggataatttacttgaaacaaagattactatagatataattggtggtgacagttttcctcatataatggttagagataagaatgatatgttatatctgtgggaaaatggcttttttgggactggaaccttatcaagaagtgaacctacatggtataccagaatgaatcaaatagtcaatggagatatcacattaaacacgggagatataaatgaattggaacagattacaagaagaagacgtcttgaacgattggagtttaaaaaattgagagagaaattacaaatggagttgttagaattgaagaaacaaagtgctctatcaggcagtgacattgacagtaatggtggattggacgagacagaatctttaaaaagaattaatgatttgttattgaaacaaagggaacaattacgtgattttaaagctttacaagagtcgtataataaacaaaatataggtatacatgacaatgtaatggataacttacaattcgattatgagtcattattggacgaaaatggcgatttgttatcattagaatcattagaattaatgccagttgaagccacgtttttaagttttgcattgccagttttaaatataacaccaagagaattatttagaaaaattttgccaaataatgataatagctcatatgatacagttcacagttttattattcactatgtagcatatcatttctatagatcacatggttggtgtgtccgatctggtataaaatttggatgtgattatttattatataaaagaggtcccccatttcatcatgcagagttttgtataaatgtaatggataatgatcctttatattatagaagcaataaaaatatgcatgattatacgtggtattcaagaatatctcgtgtgataggtggtgcgaaaaaagcattgatcttgagttatgtgacaagacagaccacaaagaaacaaattatggaatggtggataaagggacaatatcacaaagtgtttaattcatatgaaatcagtgaaatcatatataaacgttgggtcccaggtagaaatagagattgaatactaaattgaagcaaaaagtcaagtaaaaagaactatgagcaagcttctattttaccatttttgtttttgttgtaattgttatatattattattagatatatatattataggtgtatatagacatatttatatatgtatacttatatacgtatttttatatattttcaagtacccaaccacagtctctgaatccagggaagttagcctttggacctttgattggatcatcatatattgcgtttattttaggatcgtgtgatgcaggttttgatatacagatatatttatcgtctggcaatatacattttaactgtgatttaggaaatggacaaggacaatcttttggagatcctacacatgctaatgtatccgtacataaatagctcggacatggattatctaataccgtatcttcataggaattgtgctgctgttgctgttgctgcttttgttgaccaaaattcatcctaaaaccttgtgtaagaggaataataatacaaataaaaaagaatgtgcacacagacttcattattattaatagtatagttataatctgatcaacagagatagttacggataatttcttggatatactattgtactgaaggtgtcagtgctgggtgtatatacacacatatatatatgcgtgtgtgtgtgtgtgtgtgtgtgtgtcgtgttcatttatttatccaaaatatctctaaataaactaaaatcgaaattttcacatgaaaaatttcctcgaagaaatttggaaatttgatcgtcttagttattactataggtagtatacagaggttgttatgtatatctctaattgactttcattattctgggtcaaaaagttaaataattcagaaatcattggagagaatattatactataatcaaaacagctatttataaattagttctaagttttcatatatataaataaagaggaaaagagatagagggagaaagtgtgtgtgtgtatgtgtatgtgtgtgtcctattttataaagaatgtattatgaaataaaggattataataaactttataatgagatcatcagaaattcgtctagtccgtcatcatgccatttgtgtatttttgtctcatgtctgaatattgatgctctttgtgctacgaagatgttatcaaacttatttaagaaacaattggtacaattgcagattgttcctatatttggttactctgaattgaaatggaattatgaacaaattaaagataatcaatcaataaatagtataatattggtaggttttggtgggtttattgacattgaatcttttttagatatagatccccaagaatataagatttcaaatgagataaataatgtaaatactgatgataaaataaatgtcccagacaacaaaaataaccaagatgaagaaatgaaatatctaagatatttttatatactggatgcgcatcgaccatggaatttagataatttgtttggctccactatgattaaatgcttggatgatggtagtgtagaagaagattctttaaatgatgtcaaagttgcatacaagcaattattaatgttagaagaggataacaataatgatgatagtgacgatgatggtgatataacagataaagataccgaagaagaggaggaggatgagaaagtttttataaatgttaataataaaagaactaaatcatcagaggttgaagaaaataagtatacaaaagatcatgtagatttggataaactaccccgcaaacaaagaaagaaacagatacatcaatatgaaaatgtactagaagaatattactctcaggggactacaatagtgaactcaatatcatcacaggtatattctttattgtcatcaattggtgaaacaaatttacaacaattatggctgactattataggtacaacttcactagatactgaatatacagcaatatatcaaagactgtttccaattttacaagacgaagttagaagactgacaccaaatgagggtactaactattcaaatgtaggtaaaagtagtgcattgaaaaatgcagatacattaactttagaattacagcctgattattacttatttttgttaagatattcatcattatatgatagttttttctattcaaattatgttaatgcaaaattgtcattgtggaatgagaatggtaagaagagattacataaaatgtttgcaagaatggggatacctttaaatgtagctaaagagtcatggatttatatggataatagtataaaaaggcaactaccgatgatatttgatagaaatctagataaatatgggttacaagacattcttagagatgggtttgttaaaacgtttggttatcgtggaatgattagtgccagtgaatttgtagaagctttgaatgcgttattagaagtaggatactctgtaaatatagatggatcatcatcattattattatctaataacaataatattagctcaaatggtaatggcaatagcatgaatcaacagggagtagaaggaagagaagaggaagaagggaataataataatataatagtgcaaggaaatgacaataagataattagaaaaaaatgggtatcgaatttttggttgagttgggatgcactagataataataagatagatatattgaaaagaggtatcgagcaagccaaatatttacaaaaatgtgtttttgagacaggtgttgcaatcctagagaaaaaattaattaagcatttaagaatatatagactgtgtgtcttgcaagatagtccatatctatctttatttgaaaatccattgactttattaagattagggaattggttaattgaatgttgttcagagactgaagagaaacaattattgccaatggtcttagcatcattaaatgaacataatgatacatatcttgttgctggtctgtcccctcgatatccacgtgggttgaatatctcaacagtgaaaaagcctatactaaataatttcagtatggcctttcaacaaattgctgaacagacaggtgctcaagttagaatagataattttgaaagttcaataattgaagttcagagggaggacctatctccatttcttgagaaactaactctaagtggtttattatagattaacatgtacacacatacatacacagatatatatgtatatatatatatggatggatggattaatcaaccattccaagagatgtatatttaaactgtgattcctgtgttatctattagttggaatgtataatctttagtgataattccagaaaggggatgtatgggtggtcacatctttaatcttacacagacagaaaaaagtgaagtgttaatatatagaggtagacaaaggaaaagatcttcatctaaccgagaaagatgataatgagatgactttgggatcggtgagctcaagcaaatatatattgggataacattagtggaggaaaaaaaggaaagtgagacagttgttggttgtggaaggttttactttttggtttcatgttgttgttgcttaaaggttgttacaggttatgaataaccaatttgatctaaggataccatcttttaagttatggaaaagtagtgaaaaaaacatatctaaaaataatatagggagttgtgagatgttcagtgtttcaaagaaagatacttatggaaatcataatggagatatattaaatgtgatacattcacctacttctcctaccaatagaatattgcgtaatgaaacaagattttttccagtaagtaataaacttccaactatgagtctagacatggaatcaccattcctggattacaataatttatcaaatcaggacgtgattccgtacaattatatgcccttttttggtaatagacttgtcagtcaaagtaagattgatgctttaagagagactgaagtaactgaacactgtttaatttttcatgaagatgtggaacatgatattgattttcgacctgatctatgtttgaattgtggtaacaccaaatataatcacaatatctataatactaacaaaaataacagaaatgatagggctaatggagatagaatgactaattatttaaataacatagaaaaaaggtatagattgaaaaaggaacctcaaaagattactaaagcacgtcacagttcaaatttatcaataaatacttgtgaagtattggaaaatttttggaaaggtagcgatttactaaattcattagacccaaattatttagaaatgttatccgcaattgctcggaatgaattagaggagatttacaaggcacagttacttttaaattatgagaatggttcctctttagatttggatatgtctaaatcttctaggttacgaagaaattatcaaagagctttatcaaaagcatcatgtatacaaaaacctttaaaataaactaatgctctgttcaacattaagcgtaaactagatatttacaggatagagagagatattatacataaaaagaaaagaaaagaaaagaaaagaaaagaataacacaaattaatattcattattactaaaggtaaaagatatgccaataaagcacagtaaataaaatatagatgacaatgtattgtaaatttgtattactttatgtacgttgcgttggaaggaagtttccttttactatctaaagtgtaggggcttatttgtatcctatgctttttttacatctcctttactattattttagggttttgtgtagatttttcttttttttaaatttatttttctctttgtttttcccagaaacagaaactctgattcttgtagaggtcagctgacctggaggcgttttttatttcctattttggatttttcggtagtttctgtgtgtttttatgtaggaatcactcacagccaactttgggggagggaggacggtgaggtgtaatggaattttgatagtggtggattgataaagaagttcgtggtcatacgaaaatccatttgtaattgtcaacaaaatatttatctcagagcttctagggttattcgagaaggacagattcaaatattcatcaagtttagttattttatttttctacgcgaatataaagcataaatatccaagcttaaagcaattttaattattttttttgttgttgttattgtgttttctaaacaatgaatattgttaaattacagaggaagtttccgatcttaacccaggaggatttatttagtactattgaaaagtttagagccatagatttggacgataaaggttgggttcaaaaacaagaagccttagaatcagtttctcaatctggtgagactacatacgacgaagctagagagactttaaaacgtgtcaatgtcgatgcatctggtagagtggaattagatgactatgtggaattagttgcaaaactgaaagaaaataagtctgagcccgttccacagacaagttttgatgtctctccaggcgtcgtatcttctatgccgcaagcaaatagacctatttctccattgccaaatcaaggtggtgcatctaacattggtggtgccactggacagttattaggtcatgctggatctggttcaagagctagaattattgttggtggtgctactactggtactacacacactattaatgaagaagaaagaactgaatttactaaacatattaacagtgttcttgctggggacccactagttggagctttattaccttttccaactgataccttccaattatttgatgaatgtagagatggtttagtcttgtcccagttgattaatgactctgtaccagatactattgatactagagtcttaaacattccaaaacctggtaaagcattaaataacttccaagctaatgaaaacgctaatattgttattaattcggctaaagctattggttgcgttgtggttaatgttcattctgaagacattgtggaagggaaagaacatttgattttaggtttaatttggcaaattattagaagaggtcttttaagtaagattgatattaagttacacccagaattatatcgtttattagaagaggatgaaactttagagcaattcttaagattaccacctgaacaaattctgttacgttggtttaactatcatttaaagcaagctaaatgggataaatcagtttctaattttagtagtgatgttgcaaatggtgaaaactatacgatcttattaaatcaattggctcctgatttatgttctagaggacctttacaaactgtagatcttttacaaagagcagaacaaatattggaaaatgcagataaattaggttgtagaaaatacttgacaccaagtgcacttgtcgcgggtaatcctaagttgaatctggcatttgtagcacatttatttaacacacatccagggttggaaccagtagaagaaacagaagcccctgaaattgaagaatttgatgctgaaggtgaaagagaagctagagtgttcactttatggctgaattcgttagatgtggatccacctatcgtatctctatttgaagatttaaaggacggtattatactagcacaagcttatgaaaaggttatgccaggatctgtagattttaagcaagttaatcaaaagccatcaaatggtgctgaattatcaagatttaaagctttggaaaataccaactatgcagtagaattaggaaaaagtaaaggtttctctttagtcggtatagaaggttctgatattcttgatggtaataaattattaacgttaggtttggtgtggcaattaatgcgtagaaatattacaaccacaatgcaaaatttatcatctagtggtagagatatgagcgattctcaaatcttaaaatgggcacaagaacaagttgttaaaggtagtaaatctacaacaatacgttcatttaaagatccatcgttagctaatgcacatttcttgttggatgtcttaaacggtattgcaccaggttatgtgaattatgatttagtgacaccgggtaagactgaagaagaacgttatgctaatgctagattggctatttctatagcaagaaagttgggtgctttaatttggttggttcctgaagatatcaatgaggtccgttccagattgattttaacttttattgcatctttaatgtctttgaacagaaactgaatgggtaatatatacaattgtatatccatgtttatctatgtatatttatagtgttaatttccattttattttattactatatatgcacacttctatctctttatgtttaaaaaaaatataatagaaacatagtcctttttagaaatatgaaatatgtagatgaatcacttagttttgctgaggggagggttccaatgtatgctttattttaatatgacgttcgttactgaaatttattgaattacttaaaatatttataaattaattaaatatagtaagttttattaaagaatagatatataacgtaaaaatattgactaaatgatatcaaattggtattcttgtaggtttaatttgatccttcaacttttcgtcccattctttacatttttcctcaatataattataaacgtctgaagagccagtaggatcaatgtcggttcttttaatatattccatcccatcaattgatgtggcagatccatatttaacatggtgtggctcaaatcttggatttgcgagatgtgtcacataaattggcgcattggcagctttataaccatcgatgttgtgccatggagagcctagtaatctagcaaagtagaataataatagcatcccataataagtgaaaatgtttaaatatttgaaaaaggaatgactagtgaaaattccagggtgtacaacatattgattgataccatatttatccaaaagttttttgtaactggcaaagtgtaatagatccaataatctttttgaaccttcataagaacaatctgattgaagtaactctaaatcattcatagaaagatattttggatctgacatgatactggagatccagacaactttacccttacctttactcaattgaggtaatagtttacgtattaaatagtatggaccaaagacattagcttgaaagactaggcccattccatctttggatttgatgccaactttttggatcttataagttggataagtgacagctttaattggattagaacacacctctttaacagcaccgaaccaatcaatcccatcataaaccccctgagcagcattaacgtagaaatagttaatctcttggtaattgttatttaattcgtaccatgcattcaatatagaaaccatgtttgtaaaatcaactaaaatatagtcataaatgatgcagcctaatggcttatttagttgttttactttcttttttaataattcgatgacttctttaactcttggaagagttcttgatgttaccacaattgttaaagtttgatcattgggtgttttttcaattaacctataagcaatattcaatccaagattactgtttgttccagtaataaccgcgaccttacccattatttcaaacaaactattatttattatgatactctataaaatgaatattctgagcctattaagtgtcttgttagttctattactgtagaatatgagtttttttttctctgtttattaataaggttgttcgagtaagataagctctcttattgtatgattgtctctagtattctcttttggcgagatcttcaactttttttagttctttttgtctcgaccgccccgaaggaatattccggaattttaaaccggaaattttatataataatcaaaaaaaaaggcattatttagaacttgaagaaataaaaatttgtgccacaaaagttgttgagatttagtgcctaaatgtatttgattagttggatgtattcttagttatattttataattattatatagttaatcgtaaagaaaattaaaatagatttttttagattccttttttactcgcataatgtagaaataataaaatacataaaaataatctagctaaaattgagacatgatattagaatatttttttgcttcttatataggttaaataattttcatagaaaactcttataaaaaattagctagttattcttagcaacttgaagtgatatttaaataataaatgttcatattgtcatcaatttatttttttttctttctagaatattttattctggtaaaatttagtaaccaaaataataattaagaaaaaagtgagtataaactagttgccacaaaattggtgttatatattaaaaacaatcaaaagaagttaataaaacaaattttacagctacctcaaaatatgttatgttactattttttttttcctatatgtttgtttttacactttatttataggataacagagaggtttaattaaaaacagtttaaaaatattattgttttaacaatgacaacaaacttcagcagcatcttgagtgtatcatcttatgatatagttgtttattaagttcatgatataccattataggtaccaataggctatggcaaatcacaattattagatagatttttgataaattcctcttagtttttctttataatcctataatattttttttttgtgagaagaagttcaaactggatattctaaaaatatctaatcaatgggtaattttgaataccatagtagctgactgggaacagctgaaactctagactcaggctgcgagtatatctgaatgaaatgatggtctgactaacgttggtagctaactgctgagaaacttgtttgagagacctttgattattgagagtgtgtgccagaggtaattatcagtattaacattattattttatctaataggttccattcagaagaagaataatcagattatagtgaatttactacgactatttttgtttattaatgtagaatcgaccttcatataatttataagtgtttatattcataattaatatccatattttaatatactacttgtgataatgtttacacacatatttcgttttgtaaaatgataaaaagttattacaattgtaaatctcataaccatacattagaataaatatatcataaaatatttaagataaaacatatatagcattgcaatatatattattaaaaaagtaaagtagatcagatactgtcatctaaatatgtacaaaaaagaaaaaaatgataaaaacacaataaacgctaataatttcttatattgatgatattagtcataggtaacttcttcgaagattgcatgaaatggtggtttcattgatgtccatatctcaaattgggctacaccttgataaactaacatttgtgcgcctggaactatattccattgaaatttgctgctagccaatttcatcaatgaagttacgcttggtttataagcagcgtctaacaatgtaggaataaaagagactcttgtacccttggataagaaacgttctactttattaattagttcatctggcaacggcttatctgctggaatacaactaacagcaacagatatagagtcagtaacatcttcagcttcttctacagtattgatcaaatgaatattatagtccactgggaaagattccttcaatgtgaccattgattgatggcttctattaaccaggtatatcttagtacaacctaatttcttcaaagcatatacagctgctctggaagtgccaccagcgccgataataaggcctgcagtacctgaaacacaagttgggacaccattattaataaaagaattagtaatacctaaccaatcagtattatcacctctaaatttaccttgacctaatgggataacagtattaactgcaccaattgtttttgcagcatcggtcaattcattcatatatttcataatatctaattttagtggaattgtaacggctaaaccacctaaattcttgttaccatctaataatttctctttaactaattcagcagattccgtttcaaacttatcaaacctgtgtggtaagcctaagatctcataaccagtattgtgtagaattggtgatctagaatgtcctattggactaccgacaacaaagaattcttttggaattataccaccaattgaagtgtaaattttgttaatctcagaaacagttaattgacctggggcagctacattatctattaatgtagatgtagctggagtaaggatagtattaaaaacacgagagatcttaccaacttcagtcatattgatggcaatcaaaggctttaatgtatgagcatgtctgaatctttctaatgctaaattatcttcaaatttagtagctgtaccaacaaatttgataatatcaacatccaatgacaaagcttggttatatctgttttcccattctgaatcatcccatggaaaagctgcgctgaaatcatgatgagaaccaataattttagtattacatttgctattcaataattcatattgaacttcagttggaaaagttaattctaaatctatatattccacaccagccttgatagcaagcgagaataggttggaaagagcttcagacgaatcatctgggaatttaccaccttgttgcttagttctaacagtgaaaactattggtaaactttctgttgctaatcttaatgtagatatttgtctagcaataaaatcagaatcatgcttaacaagatgatcaactctaagttcaactgcctcacagccataacatatttctgataatttattagtgtgttcggttaaatcatcaaaggttaagcaaacaaaagcagatctcttggttggaataacaactgggctattaccagtaataaaattaataaacttagagaaagtcattcttaatttctggaaatcaagctgtgtggtacagtgtggcgcaaagaaagtataattggaacactcattgtaccattgttctctcttttcccaaacctctcttatttgttcaacaaaagcaggccttgttggatcagattttaggaatataatagtttcttctatgtctctatgtaaatgtaagacaatgccaccagcttgagcaaaatttttcaatgcttctctattagcaggtgtttccacaattccgccaccagtggagaaaacatagccgtcatcgccatgctttgcaatgacttcttcaaagattctagtttcttctttacggaatttttcccaaccatgctcagctacataatcctttataggacattttgcatattctttttcaaataattcatctaaatcgactaatttgtaaccaagagtagctgcacaccacttactaatggtagttttaccagcagctctcataccaatgataacaatgcttttgttggatttcttaagttgattttctattggttcagcaccatctaattttgcacctaattgtgtatgtaaaacatcccaccaacctggccaagtcttactagtacaatgtctttctagtattcttactggtgtattatcagcatccacaagacccgctaataaggagaaactcattgccacacgatgatcatcatatgtacagatacctattggaccggtagagtcagaaggcagtttcaagttagaaatatcattgagaccatgaacttgaataccatctggtaattcagtagtcttgacaccaaatttagccaattgagtagccatagcctcaattctgttacattctttaactctttgatttgcaataccttcaatagtagtggtgttactagaggttggatcatcatcatgtgccacagctgctacaacacatgcagttaaaaatgcgtccgtcattggttccatattaacatgtttcaatggttttaagccgcctctttttggtcctgtaacagtagttgaggttgcggtttgttctacagtacagcccattggtcttaaaacgtcaactgcaaacctagcatcaccttgtaatgactcataacctatgttaggaatagtgacagtggatccagttaaagcagcaaaggccaatggatatgtagcacttgaggcatcactttcaataacatactcaggtggattaacatattgtccctttggaatatgatatgtatatggttcagtctttgatggttccactttaataccaaatttttccatcatcttaatggtcatgtcaacgtataattgagagattggttttccaccgaccaaagccaaagtaactggttcttcagcatatggagcacacattaaaatagatgaaacatattgagatgaaacagtagcagccaattcgattctaccacctttaaattgagaatttgtgtaaacttttagtggtaaagaaccttcattgttaagataatcaattttaacaccattagaacgtaatgaatcgactaatgggccaattggtctttgctgcattcttgcgttaccagttaagatgatgtgatcttgatcctttgatgattgtactagagcagctacagttgtcaagaatctagaagctgtacctgcattacccaaatataattcttctttacaagcagtcaaagtttcaccaccttgaccctgaactacaacaacttcaccatcgttttcccatgatatttgagcaccatttaacttattgacagcgtttaacatatgtttagtatcgtcagaatgtaaaagattcttgattttacattgacctttacctagagcagctaaaaccaaagcacgattagatatagatttagaacctggtggtatgatgacatgtggcttctgacccttttgattatatttaaatgggtacactaatgtttcgtcagttaaaacaaatcttaaatcttcatcactgacacaatgagcagaagtaccataacatttaccaattgtctccaatagaacacatttctttttggaaccatcgtttttcttgtcaatagccatctttgcaagtaaagtatcaatcgatgttttcttttgtaaggttaagtctttaaaccatttttcctcaggggagattggtagaccataagctgctaaaattttcgatagacgtgctacctgcgttggtgacaaaatacctaaataacgtgacaattcagcttcgaagatcatcccaaaagagacacattcaccatgtaaagcctgtggagttagaatagcttcataagcatggccaatggtgtgaccaaaatttaataagtttcttaagcctgattcacgttcatcagatgatacgacttcggctttaacttgaatactaccaagaaccaatttataggtatgttctaacatatcaacgatgttagtatgaaagatgttataaacgtcgcctgtggtttcattgacagtggagatttcctcttgagaattgacgacagataagaaaagattagcattttcttctaatctattaaattcagcagcatcccagatacaggctgttttaataacttctgccatcccgttgataaactctctttttggcagagtctctaaccatttaatatcaactaagacaaattgaggttgccaaaaggaaccaatgaaatttttacccaatggagtgtccacggcagttttaccaccgatggatgaatctaccatagctaatagagaagttggaatatggactacacggacgcctctcatgaaagtggaagccacataaccgatcatatcacctattataccaccaccaacagcaatgatcactgtgtctcttgtacatccttgagacaacaagtaatcctcgactttttctttagtagctcttgttttattagcttcacctggtttagttatgtatcttaagagacgtgatccctggggtaatttttcattgaattcattaacaatggtttgcaaatatggtaatttgtttacatttgaatcattaataatggcataagtagaagatttacatttgctaatgatggtttccactatatgggtatgtatatcgtaaccaacatggatagtatcattacccaaaatagacactttagctaatggtacacttttcattttttcaatggttgaatataatgatagcgagaaagaaaaaaaaaagagcagtagtaatctaatggaagaaagcttggatagtaatatagttttaaagtatttatccttttctttctttccttttccttttgtttgtttgtttatttgtacttgtttcttttaatagattatttaatcgttgatcaacacaaaacagtttgtctataatcccttaatgaggtgagaagagaccaaagaaataaacttaaaaggtagaagcaatttgagtaataaatgttaaactaaaataaaacagcatacaaaataaaattagttccactgaaaggtactgtaacgagaagcaatcgtctgttcaactagttaagaataaaatgaaatccattagtcaccttgccaatccatgccattgcctcctcgagcatgactgaaaaatttcaaaacgcaaaagcaaaaattcaagaattaaaaaaaaaaaataaaaataaaaataaaaatagaaaaaaccggaaagacatagaatgagtcatcatcatttcatatatagatatagatattacgtagaccatatatatcatgcaatgtaggcacacgtttgtgtatctcagcagaagttttattttgtgaaactattagaaaacggtgaaaatgcgaaatgctttactggtatagtctgccagctacccacttccatgtccatctagccacttttctacctagaaatttaccaagaagtgggagtattacccaatttatcacttggtttaattgaacaagagactcttcccattgtcttcgagcctccttcaaagcttcattttctgcttctgtatccgtaataatagaactagagtctgttaagtcatctatctccgcttcgtcgtcaatatcagcagtgccatgatgatgatggatattggcatcagtattatctgtatgagctatgtgggaatcatgatttaaagaatttatattttctattatagaggattgtagctgtgagtgcataccttcagtagcctcaattatctctgtatctaaattcattgtattatatgacatttatatctacaactctgtatatgatgtatccatagtatgttaataacaaaacaattaacaaaaagcaataaacagtaactagtaaatagtaaacagtaaacaactatgtattgaatggaaaatcgtgatagattattcctttgacctttagtgtttgtttttatctatgaaatggtttgtctttatttgatataatttactgtatcaaaactagttctttttcctttttttcgttatgcgagactatcgagaatgaatttcgacgagttaatctattgtactatactctgcttttagtatagcatccaatagcaggtctcacgtgtgttttcaatagatcgtctatgtgatgatgttgagttgacagtgtctaggtacagaggcctgtgagatcaactcctattagtgagtgtctctctcataaagagaaacgttgaataatttcaagtgtcttggttatataatacaaacggcggattttgtcaatttccgtaagaaaaaaactttgaactgtcagacagaatttacaaagtctcttcgggttttctaaccctgtgattacagaatttggaatagtttcaaataattaacataatggtagcaatagtaataataataaagaaaaatttgttaatgattgtttactgacaagaacatatgaattgtaaaatattttgttccattcatttattttactgcaccttggtttgataaaatgggcgaatatatatatatatatgtaaatacttctactttaagaaagttgtgtattttgtaacatatcatcatgaaacattaatataaaatcaatttgcacatattgaacatacttttataggttcttaatctcattaaataagatcaaacccttaggaattggaattatttatttctggttgatattatatgtcctatgctgtggttagagtaataattctatggagttgtaaagcaatctatatgattattattatcatttttattaaccaactcatcgattttttcccataagttattgatctatttaatctgtgtttgtcaatatatatgtttctttttttctttttttctttttttctttttgggctttgctttgagggaaaatcccgtggaaggccgttccgtggatctgtgaatacgagaataggaaacttcggccgatctcttcaaacttttttttaattctagaaaacaagagcttgaagcttcaactacatgagaattgtggaattgcaaagacaaaatagcataaaagaaacagccttgtgtgctcaaaagttacgagtaattagataaccagtgtttacctgataggattgttaatttttcttgttttttgtctttttctttttttttttgggaatatatatatatatactcaatatgaaagtctacagaatctacaatttctttccaactttctaaaacaaaaaaataaaggctccattttttggcttatctcaaataatacttgtctggcaacgtcctaaaccaattatcaacatattaaagtgactatccaataggagatattcacgaaagttaaataatcaacgagaaaaaagaagaagaagaagaggaagaaaaattagaatttgtaattaagatattatgtggtctccaaatctacctttcatatctacaacctgtcaaagtatgaataaagtagatatggtactaaaatcgtatcaagatcaaataatggattctgtaagaaaagaatgtgatccaagcattcaaattacaaatcaaattattgatgataaaattaatcaatggcatttccataatagcaaagaaccgatcggcaagaaaaggaatatgattgttacaccaacattgttggtacatggttatgcagcgtcatctatggcttatcatagaaatttcaaagcattgtccagccaaattaaagatctgtatgcaatagacttgttaagtaacggactctcagcttacattcctttagaaaagattccatcatcatcaaatttgaaatataaacttttaaaagatgaaaataacaacagcaataataaacaaaaacagattttaatcactgatgattgggaatcgatagataatcaatgggaaatgatacatcattatgaaaattattatatagaatccatcgaacaatggagacaatggaatcatattgaaaaattcaatcttgttgggcattcctttggtgggtatatatcatgtaaatatgctttaaagtacccaaaccatgttagcaaattagctttgttgtctccattaggtgttgaaagaaatatttcttctttgcacaatgtgaaaaatgatacatatgctacgaagaaaggcgatattatatcaattaatgaaatcgatccaacttcgccatatttcacaagactcttcactataccgagcttctttttcaataaccagttgaatatattacgatggttaggtccagttggtgggaagttagctcgcactttcattgataaaagatacagtaatgttccaaataaagcataccatgattatctatatcatgtgttctataaatctaagagaccgttcggctcagctaatgtattggcattaactcatcttttcacacgtcaaatgaatgcaaaggatccactattggataattgtgaccaattgaaaattaaagatattttaatggtatatggagatgaagattggatgaaccgtgatgcaggttattgtatgacgcaagttttgaataaatcaggacacaatgccaaatattttgaagttcctaatgcagggcataatttattcttggatagtcctgcatgctttaataaaactttaatacaatttttatcttagatttttcctaatattctacgtataatattatttaaattcatatatattgtaatatattctaaagatacttctttaacatttgtgacactttaaaaaaggaggagtgttgggagggcggaattgttcatgttactctgtatcccaaaaattccttcatatttccgccattttgcatatttgaaagtgtcgatttcttaaagtaatcgatgaagggaaaaaagagagaatgaaagatgaagaaatatctgaaaacttcaaaggaagagttcgatggcacaacaagaacggtgatgaaataacataataattcaatatatgctggcgtatactattagatagtttgtttatttcttctactactggaaaaatttcatatgacttataataatatggcaaataataattctctctcgtcgccaactggtaatggaaaatgtgttaatttgaaatcaagaaggggtggtataaccaaactagcatgtcttaattgtaggcagtcaagaaaaaaatgtgatatggagaaaccgccatgtcttcattgtgctaaaaaaaatcttacttgcgtgatcccagagacagatttgagaactcgaagaaaaaccgtttcctatgttaacaatttagaaaagtgtgttgaacaattacaatcagttttgttgcagataaaaacaactactaatgtagatcaacgaaacaaattaattgatgatatatctattattgatgaaaatagtccaaaaactgataaaccccttttaaagataagcaatgttatgtccaatgcttctgctataataaataccaccactttaccaatagtgaaaccccttaagaagaatattggggttttgggtaaaaatggatcctcgtttctttttccatcatcttcacaagaattacctaccacagagaccaacagtatctatccttcaaattcattgcttatcactaaaaaagattcggccagaaaagaacaagagaatcaaatgattttaaaaaatctttcaagatctccgttaatccttcgatctttatcgttattctttaaatggttatatcctggtcattatatgtttattcatcgagaaacttttttaagtgcattttttggggatccttcaacaaaagcatactattgttctgaggaattagtctatgcaattgctgcattaggtgctagagcaacgccaaaatctgatgaattgttcaccaagagtgaaaaatattatcagcatgcaaaacaaattgttttaacaaaaattttccaattgattgatagatcattagcagaatctacatcgtcttcaaagttggccattattcaaactttattatgtcttgctttctatgatattacgagagctgaaaacccaatggcatggtatttatctgggttggcattccgtatatctcatgaaataggtcttcatttgaatccaagggcctggaatcatgtttatgaagatgaattatccaaaatggattatgcagtaagaagtagaatctactggggatgttatttggcagatcatttgatctctgttttgtttggtaggtctactacattgagaatgtcaaattcttcagtccctgaaacagatgaattacccgatattgaaaatggaatagaggattacatttttaaaccaggagtgccaacaagatgggcaaatccattgaaaaaactgatatatttatcaagaatctcagaggtgtttgcaacaaaaattttcactcaaacggattccttgcaacagagatgtgaccatttaatcaaattcaatcaagagatgcaaaattggagagattatttaccggatgatattaaatggaataaagagtatttggaaaacttatccttttttgatcctaccgttatgtatatgtggtttcattactatattgttttgatttcatataataaaccatttatatcaaagttagatgaaagtaagaaattaattgaatcatatattgaagaattacatttattatttaagatttgggaaaggaattatcctacatttgaacggtgtgatctttatatgatatattcggcgattctgtgtattcagtgtatgaatacaaatgtgattaataaaaaatattataagtttttcaaaggatttcttgaagacggaagtattaattatgaagtaaccaagaactttattgaaaattgtagcagcgttgataatgctaataataatagtaataacaacaataatactaataatggcaacaataaaaataataccaaatctggttcgagtaaatatcaagacaacaacaataatgctacgaatagtaatgatgagataaataccaacgattatactgatttgttaggttcattaagcaatggaaatgattttgcattggggtataactttgattttacattattaaatgaaattgataaattgatcaataataatagtgattggaataataatgatttcaataatcctaagaagaaattaggaaatacaagagggtaatccattgggatgagattattttatttatgtatatatataactttgtgaattggcacaagtcaatagtagatgatatatattatttggttcgatggttattggtatattgattgagagtgtataagcaaaaaaaaaatcctctttaattccgcaaattggcgggttagttattccgcatatgccgtcaaaagtataaatgcaaagacaatggcaaattttgtttctttacaattgtttcaatcactcaataaaataagatcttgatttagaagcaggaatatcatagaattgttatataaccatctatctagcattagtttaggtaaagcgtattgttaattgattagttaactcatttaccttgatgccaaagcaaagtaccagaaagcaggataataataataataataaaaaggaataaattaagatagcagcagtaatttatgaatgtcataaatagatttagtacattaaattaacatatgaatcaatgatcataaataatgaagatattgtaggatctgaggaagaacaagcacatattaataaggctctttctatttgggaaaagggagttctcaaggaaaaaaatggatctatgtcagatgcaataaattattatagaagagccattaagatacacgaaggggttgagcaactttatagaaagaaactgcatgatgagtgggtactccaaaaaaagttacaattaatagatattaataaagacaaaaaattgctaagtcacggtgataataaggatagtggaacttttaatagtaatgataaagaactgaacgatgagatagaagaggaggaggacaaggaacttccaccttgttggattttggaaattttacctaacgacattttattaagaataatcaaatatgtcgtactttcatctggtgaatcatgggtgaatttatcgttaacctgccaaaagtttaatcaattatgttttaataacactttcccatacaaaatttttaaagattttatatattcaaaacaaaaatatgacagtgcatcaatgatattgaatggaatcaaagatttaaggaccatggaacaagaattatggggagatgataatattacaatgatcaaatcacggccatttattaaatttggtggtgtgtatatcagcatagttaattatttaagatatgggacgcatgctgaaggctcatcatctttattaaaccctgtccatatgataacatattatagatacttcagattctatgatgatggtactgtcttgaggcttttaactactgatgaaccaagtcatatagtaaaaaactttaataaagaaaggaaacctaaaaatagcgaaatatgcaagtggcaaattggatttgatgacaattttggtagagtgacaattactaggaataaccaaaaatatatatttagagaaactttagtaattaaaaaacaaggtaataaaatccatcaaagattaaagtggataagttccactgtcgaaaataatgagggagaaatatccgaatgttcgttaagaaatgaaaagtcattttatttctcaagaataagatcatataatgattagatcattcttcccccttcctatttttgattaaatttatccccttgattaaactgttttcagaggaaatatttagtattacaattatgtcagtattatctaaaaattggttcaatttgtttaaaatatatttctagtacacatttttattatctctaacaatgtgttatgacctattaaacaggttcagatttctaactgaaggaatatttattattgatgcttttaatagaaaaaagaaagaaggaaaagagagaggaagagggaaattacacaacatggtttacattatataacttaaacatctaaatttatatagatttaaaacatcagatttctatcttttatttttgaactttatgcaacgtataaaatttactatcggtctgcttgaaaaccacttaaaataattattttgccaaattatgttactaatgctttattatatatatgtgtgtacgtatgtacgtatgtgtggtcaaacctgaataacaatacaatatgcctatttatgtgtgataaatgttataaaaacatatatatatatatatatatatgtgtgtgtgtgtgtgtgtgtgtgtaaagtgtaactataagtttaagtcctttaaaatagtagatgccagttctttatatagccaagtattacctgacacctttttgaaatgaacacctgcaagcccaacaattctaacttttacgatatggatttcgaacttaattggagctctttccttgatgtctaccctatcaatgtcactattagccatgttcattccttgcacttttgaagtagttaataggtcatctggactatggaattcatcaattgaggcagatgataattcttgcaatgcattattataaccaacttgttcagaaataggtgatgcaattaaagatacatttctttcatgatgagccatattgttaggagtattggtgatgcctaggaatggttgtttcaatgattgctgttttctaatagaactacgacgagatacgcttcttatcgtttcgttagatgattgtggtcttggactagtaatgttactaggagaatgtgtagaatttccactcttttcaattttttcatactgatctccaaaatgcttttgtacacatataaacccacctttaacttctttgaattcaatattcatctttttcaaaacgtaaatgattttgtatctcacaataggaagtggttttgaagaggtagtttgtactgaaaagaaaccctttaagaacaatgaacgtggatagtcgatcgaaggcatagaaccaggtggggcccttgcagcttcggctaagatttcttcgtcggttaattcaggtagtatttcttccacagaaataccattttcatgcgaagtttttgtatttaatgtattgttgttttgattattattagtagaaaccatgttggaaaaggtgatacgtgtagaatctgatttactatcatcactatgttgtaagaaaccagtattttctacatctacaggataattattcattgttaaagttggaggagctggtggacgaataaattttaatgattcgcgacgagcatgaccaactgatttagctctagcacttgggtgatattttctacccttgactactgtcaaaggtgcaataggttgagtatcatctgtgtcattaactgttggaatatccaatgttttttgttgagatggaatttcaagttgttgtggcatttgatttctaccccctttaatctttaaattatttaaatcatgctctagctgcttttctttttgttcttgtaaaagtgtttcggcattagatggaagtgcaggtaaatcagtcttcttagtctgtttttgggatgccgatctcattggaggcgtaataacatttacatgatccaacggaattttaaaagattgtgttcttgatacagatggtgcatattctgaaacagtacgtgcatgtgtttttttagaacctctcaaattgactgttaaactattgctattactgttgtccattgaagtcatcgtatccacttcataagtgttgacattttgaggtcttgaaccatcaatatcattagtgtaacgtttatgatgaattttaggcggttgtaaggtagaaatttgaggctgttggtcacgtttttgggataacttccgtaatataccaccgaaagatttatgagaatcagtaggtgtagttaattgttgtactgcataatagtcagtttctgtaggtgctggtgatattacattatcaaaattttcatgattctctgatgattttctagtggttggagatgtatgtgcttgttctggtatagctaagttaggtgaaaccagtattttcaaaggctgacgttcagatgcactgatatgattagaatcagcatcaatattactatacttaggtacagatctctttaatggtgattttaataaaggtacaggaacacttgaagttgcattatgtttaacgttcattggtgaatttactgactcttcaatagtatttgtctccagtattggtactcttttagaactattattgttttggggtgataatggaactttattttcaatctgaacatttggtgttaatagatttggatttggtgaattagaaacttgtggaatattgttattgcttggttgtggtgttcttatcattgttgcattttgattacattgcactagaactggtttttgtaatgaatgttgtgcattattgttagtacttgatgaacctgaaccaattaatggattttgtacctgttgttgtaatttagctatttgagcttgctttctacgtaatttagccagtttcctttcaagcatttcggatactaaataatacatcgataaaagaggattgtatgccttagttggatcttcaatagttaagtttgtggtgacattaggattagttcttttaatataagatacattatcccagtactgtttagaaagttcaagatacataggttctgtaatgatccttttcaaaacatctcttgtctcgtcaatattctctataaattctaaacgatacatttctttaataactttttgatccaatatctccggggtcaacggtattctttgtggtagatacgatttaactttagagtcataacctctattcatccaaggatggtctataacttgtcgtaatgatgccctcttggaaggatctaccactaacatctttgataataaagatatgacttcaatagacaaatgattcggatattccacatggccctgtttaatcttttcatgaaggacactagatacttcatcatcaaaaggtactttaccacatacaagtacatataacaccacaccaaatgaccaaacatcgacttcaggacctgtgtaggggtttgcctttaataattcaggtgcagcaaaatataaagaaccacaaaaagtgtgtaattgtttatgtaaatcataaacatttgataaaccaaaatctataattttaatttcaccagatgtagatatcataatattttcgatctttaaatctctatgaacgatattattgccatgtaaatactccaaagcgctcgcaatcccacgagcgaattttcttgcatgatgttctcttagggagccatgttgaatgatgtaatctaataactggccaccagatacatattcaaaaagcatatagaaatgatttgacattgtacacatttcaaataacctacaaatatgtggatgataaagaacttggcccagggatgcctcacgaattgttcttttatcacgagatatttctttctctagtttttttttgcctttgtaatagttcttgttcggtcttgggggggaggtaaagattgttctttatgtaaaaaagcctttgttgcacgatttacaattttaatagcacaaatctcattagtttggtggtgtctggctaatttaacttttcccatcgaccctgcaccaatagtctctaagaaatcccaatcaccaaggctctttctatggaattgtctttggacctcattattatttgtatgttgcgaaatgctattatgtgaaccgttattattattattattggtagtagtagtagggttatgtttattattattgtgattgttgttatcattattggtatgatgagggttgttatcagaaactggatttccttcggcattatttaagggtgaaatatgattatgctgctgctgttgtggatgttgtggatgttgtgattttctcatcattcttgatgtagcaggtgccaccacagaagggattggtggagctgcaaacccaattttaaactgtggattgatgtgataatcgtctttatttggcataataaattatcctaaattacaaaaaatcttaataacaacactgaattaatctatctcagaatttgttactcgaaataaatggaaagcagaaatatgtaaacaaaaaaaaaataaaatagaacaaaacaaaataaaaatacaaataaattaataaattagtaaatattaatctatgacaataatgaaatgggccaatttgtttttctgatatagttaacgagtaatataatttattgattgttatctcttttcgttcttgtatatcaatctttttttataaggattgcaataatataatgtagataatatatatatatgtggaataatgaacagatatggatatatatatatatatgtgtgtgtgtgtatatacatatatatctatatctaattatccctccgtctatctatcaatcaatttaaataatcttttagaaagttgtggaactcgaggtagtttatatcgattagttctcccccctcctacttttaataaaataatgaagatctaaatgtgagttcaaatacgcaagcagacacagcatgcattagtatataccgcgtaagaagcaagaggacgtgggttaatagaactttctccttttagtcatcagtttgtttctttaacgatttgcagattctaatggctttgcacaatttaaactcaaattttgctgttttgtgttaccttgaaaaatacgaaaagggggaaggcggaaaatgaaagaaaatggaaaaaataaaagagaaaaaaaaaaagaccaaaatcgtttgtcacgaattctaaaaaaatgttatttcaaccctacattataaactagggtaaatgtgtgattttaaaaaatattgagacagtttcactatttttagttagggtttgctaataactttttaatatttccttttcaaatttctcttcttttttttttttctttcaaacaagacagaattaaaagaaaaacaaaaaaaaaaagaaaaaagaaaaagaacaaaaaagaaaaaaagattgtaagaaatgtaaacgatcgtgctatttatcaagtttctatattcttgtgttatttactaattttacataactacaatgtacataacaagcaatagttattggaagattgtctcccctttttcgtgcttcttgtcttagatatcattgatttaaacaaaaacataaaagataaataaaaaggaaagttgatagtatagtagtttgctaatattcaacacatcaattgacttaatatatttatatttgagatacaaaaaagataagtcgagtagataaacacacacgggcatacgaatatatatatatataaaggatcatcgattgttgaaatatgaaaaggactagaagatccacaagaatttcttatgctgaaccgtcattagatctagatgatcttattccagagaacgaagtttcttccatgaggacaacaagacgatcaacaaggtcaacgagacactcaagagagcttaataaattggagattcaaaagaaagagctggagatagaacaattggagtttgttaagccacaaaagaaattaaaagttgatattaagcctttattcaaggatttcgattggaaaaattatgtaagtgaagatactttacgtcatgtggagaagacagtgcttcctgatttcccaaatgactcaaaaaatcaaatatctgatttgatcaagacttggtattatcattatgttatgtcatggctcaataatgtttgtgattcatatgttactacaatattgaattccgtcaagcctttttggaaagatattaaatttgatgaaattttattcctacaggatttttgttcatttaatcaactagatggtaatactattgaattaaatgatgataatttgtctagtaataataataatagttctttaacaaaaaatttagttgaattaattaagttgagattgttgagattattaacgaatagtaggagccatacactgaatgaatgggactcaatcatcaaagaacaattaaaaatctattatcctgctcatgatgtcattgatttgaatctaaaatttcatgatttgccgttcatagaacaatttaaatgttattactatattattaaaatcattgaaaataaaagtatgacatttaaaaattatctaaatagtcatcttgatttatttcaattttcatcgatcaaaaatgataaatctgaaaattcccgaattgtggttttaccaacacatggctcaattgtagaggtaaagacaacttttagtgatgatagtgattctggttcttctaataaactgagagttccaattaaattgaaaaattgtactataattaaagaaaataaagcaaataacgagaaggagttgatacacttagattattccaatgagattgattcctatttgcaatctattaaaatacagtataatgttttatcatgggattggccaagtttcattgaatatgttaagatgaatccaagtgaatttttgactgattttatagagattaagatggcacacctcttatattcttctaaattactggctcaaagggaaaaggccaaatctatttctttattaatggtgaataggaaaagatcatcaaggttggtggcaagagaagaagaagctaagagaaaagagatcagtaatacaattcaagataaattggatgatagaatgtattttttgaaaaatagacatagatcattgtctaaatataataaaaagttgaaagatataatttggaatattctgtggtataaatttgatcaagattttagattaattaaaattagagataaaagcatacaaaaatttattaaagatgatgaaaaattgacagagaccgatattagaattataaataatggtgcatattttacacaatccataattgacattgatgatgaatctatgtatatccatgacacatgtaacaatgatccagaacatcttattcaagaaattccctcaagtttgtgtattgatagtactgatattaaattggctacagagaatggcattgatttaaatagtattaataaaccagacgtaaaagattggatattccattgcatatgtgataattcgatttttaaacaagttcatactgaaatggatgattataaagaagagattatgaataatgacttgatatataatcataaattaatatgttgtgacctttgtaacatctgggaacactgggactgtcaacctcaagaaaatatagattacctagcacagatgcatgcgccaatacctaaaaaaggtggtgatatcccaaagattaaacaattaacagaaaaagattttagcattgtggtgttaggtaagttgactggtgaaaactattctgagttaaatcagcgtaaactaagaaagagagtagagtatgatggtggcaattatgatgatgatgacgatgattatgttcaaagaggggatggtgctgataatagaagaacatatagaaggtcaacacggctagctagtttagaacaagtgcagaaaaatgaagataacgatgtatcaggagtgcaaaatgataatgataatgatacaaatagcttacgtcccgccgatttacgtccaagatatggacaaacgtcaccatatatatgtggattctgtatgagacattgggaaaaggaattaagatcagtatttataccagaattagaaattattagagttaagcaaagaaaaggacatgatgacagagaaagaagaaaacagaagaaattagagaaacaaagattagaagagatgaccaagagtaatacagatcataataataataataataataataataatatgaggccaacaaattcatcaatgaatggacaggaaaaagaagaagtacaacgtatcactactaatactgataccggtcttacaactaatgttattagtaatggtgagtctatttcctcactcaaaactgcaatcactccacaaagaacacttgatatcagtacagatccaatagtttcaattactaataccaacactactacaatatccactagtaggatcattcccacaatgccggaatagctatattgtttagatgtacggatgtactagatgatgagatcaaggtaataacatacgacaaataaactggtgaaaacgagtttgaatttgatagtaatctcatcaatcggatatatatgtgtgtatgtatatattatgtcgatataatacacatatgaagtcttaaagaatattttatggatatacatattttttttactgttctaactaaagcatttagtacattttacacatagtttcctgtaataaaaagaaaaagaaaaatgtttcatacacagtttctcctgttgaatagttactattacactaatactactactactcacaatttaacagatatatggaagcgtaatataaatgagttaactagatataatgaggcaaaccctggaaataaatgcaactctaatatagataagaatgaatgtatacacgataatgatagatgtgagtatataattaaaggtttagcaaatgataaaaagatcgaaagacagcaaattttggcaggaagtctgttgagtcaagaatcagtaatatataatggtaaatgtagggaattaattttacctctaatcgaagatattaatttagatgatttaaatatagatgatgatgactattatacaattaataatgaagatattaaatttaataaagattatcaaccattgtttacaagaagaaacaaaaaagagataatagataattatgatgatgatgataagaagaagaagaagaagaatacgggtaagaatgatactgacaatgatcaaactgggatcagaaatcaactagtgaatccaaactttttaaaattatatgcaattgaaaatagtgcgatcaaaaaacagatcttaccggaaataatagttgatcttgaattattgcagttgctggactcagcaagaataaatcaactagattttgattcaaatattagattagccatactgacaaaaaagaaaatttggattgatatgttaaataattataatagtaataaaagaactattacagatgataaacatttcccatggaatctagaatttgttcccataaaccaagggtgtaatgacaagaattatgatcatattatgcaacaactacactcatcagtaatgaactataagccttgtggtaaaataagtagaggttcaaagcattcacacattcagtacgttgtcaaaggttggtatgacagcagatttcagcaatgaaccacatatattagtcttatatacacattctatcaaatctaaacatatacgcatgtatgtacatatatatatattcatcaattaatgttgaaaactatacactacaatccctacgtattttatattacatattcttccttgtacaaaatcgatgggatttcatttcttggaagtgaaaaattctaaaaacacgacaagaaggggaaagaaatgaaagaaaggagttcatgcacttatatataggaatagatcaacacttagctgaactagttgtacagagtagtatacattcatttaagtgcatttcaacagcatcccaagaattatttgatacaggttttacagtcacaagaaggagcatacgtgttaaataattttgatagagaaaagggatacaaaaaaaactagatacttttaaatatggctaccaggttttcaatatcttacttagaagtattacgatcaaataaaactgtttcatcctacatagatcaagaatataccagtattaataatcatgttggtaagagtagtaatggcacttatggaggtaggaagaggatgtcatatggatcaattaacaatgatagtcgatcattatcactttcaaataatttggaaacaagaggagaactggaagaactggaagaactggaagattcagcaatagataattcatattcattgtttcacaaggttgttgaggatatggtaatacctaaagttgttgataatattggtaataaagtgacaaaaatgtcaatgattttattggatggttatgattgttactatacaactatgtcgagtaccaattcttctttccctagtaatagcagtaacaacgatgatgttctaattgtttgtttcattaaattagatatcccaaagattttacctattagagtgttaagtgaattaaaacaacaaccttttgatgaaatcgaatcaaatattgaattaagagtccaaattggtaatattttagacaaatttcatgaagaattgattaattatagaaatgaaaatttacaaaataatagcaatcatacttcaattgctgaaaataagacaactaatttggatgacgatatacaagatgtgataaagttaatgaatgataatattgataaatttttagaaaggcaagaacgggtttctttattagtagataagacaactaaattaaatagtacatcacataactttaagagaaaagcaactagaattaaagataggttatggtggcaaagaatgagaaattcaatacttttaatattcgcaattatactatgtttaagtgtactattcatatttatttatgttttataatgataatattatatgcatgtatgtatgaattatgataaaaggaaaaaataaacacaaggatagaatatacattagattgtctatggctaaatattattaatattatcacaaggagtatgtatatactgaatatatatataaaaaataaatatatataaaataaaataagaataaaagatcaatcatgacacttgaaaatacttataatacccacttattaaaatcaggaatatcgatatggaaaaatggtaagttggtgcctgtagctgctctaacttcataaccggattctaaatcattgggtaccttggctaaatgataggatacatgaccagatatgatggattcatcgctataagtctcattaacatcaccgaatccaaacttgttcaaagatcttttaatccatggcgatataataccagtaaaatggaattctacttgtctatcagcataagtattaattgctttccttaaatcaattaatgattgaatagcagtagcatcaacctgtgatacttgtgagaaatctaagcaaacgatcttcagcaatggtctttcatctcttttggtttcactattttgaagactattattctctagatcattggtataatttttgttacctttaaataatttagataaaaaccttggtgcttcccattccccaggattattccatggtcggtcagatttccttttatgatgtaataatttcccaggtcttgttacttttttaactttatcaaatattgtatcataatgttttgaacaattaatgtatgtgtaactatcattcagtctataaactatgacaccgggtggtggtggtaaaatctgtaactcaccatttaattccttcgtatatttatggtcaattgggacccatttggtatgataaattattttcttggaaaataaattatccatggaacctgtagaaaatgaagtagagttcttctcataaattttagttttggaaaattttcttggttttttagtgccattgaagtcttcctgtttttcatcctcctcactaatttcatcactgctaatagtgactgaatcattagggataatgttagcattgatcacttcagctatctctacacggcccaagaattgaccagatggaaatgccactttatacaaaagaatagcacatgaccagcagacagcaaaataaattccattttcaatagaagagaatacagtgataaaaactgttaccaagaaacaaacaaaatcagttggattcattttataaaaattccatgtagtagtatatgttgcaactaagtcagagacagcatgaataatgacaccacttaaggtcgcctttgggatatagcaaaaggcgccggttaaacaatatatggcaatgataacacaagtaccactgaaaataccggatagtggtgtcttgacattacattttgcctttagtgccgatctagagaaagaaccagtagcaggataagcatgaaacacagttccgattaaattagtaacaccgatggctactaattcttggtcagggacaattttatagtcgttaactctaccaaatgatttagcaatagcaatatgttctaacaacaacacaattattgaagctggtaattcaggagcaatatttttcattaaaccatcaggaactttgattgttgtaatattatgtaacccacttgggacctcccctagaatctgaattggtctatcattagaaggcttgccatgcgttatacgccatgagattgccgtgaagacgattatcacgaatgcgcttctgcaagcttgtgcataaaaatagaattttttccaaaaatagtattgttttgaattctttgaataatatttatctatcaatttaagtcccatagaattacaccaccatttccaaaaatataggataaacatggggatgagaccaaatatagcatctaattttgtgtcaggtaaacgtttcaaacttttgatgatgactctataagtggattctcttgtgttaacttttttgctatatcccatcaaagatggtacttgaccagatatgatatttaaagcagatcctgtcatgaaacctgccacggcattcaaagatatcaattcaactaaaaaacccaatcttaaaagaccgatccctaaagaaatgatcccacacaataaagctaaagtgcttgcaattactgcagcatcgattgaaccatctggatatttttctgagacttttgcaatgaccttggcagtttccaaagacataactgcgacaggaccaatacagacatcctttgaagtagcaaagagggaatatatgaaagcaccaataaaagaagaatataatccgtattgtggaggtaacgtagccaattgagcataagacatagactgtggcacaaggacacaaccaacagtaatccctgcgattaaatcttgtgatagccatacaaagttatagtgtggcaaccaatgaattatagggaataaagattttatataatcgccgacagattttaaagtgaaataatttttcaaagagtgattaaagtattctttttctgtgacaagagcttcattatattctggtataacctggttattataattgttgttaaatatgattgtattttgaaattttttattattaattttttcataattaatatcatttaatttcgatacatgtggttctacattagtagaaaaattttgaatattattactaatactaccgttattattgtagtggttgttgctatttataggttcaaattcagagtatttatattgattatattctgcttctaaattctctaaataatttgtctgattactaggaatattaccatcatcgttatcattgttaattacatcagtattaaaattattttcagggtcttcataaggaaaagattttgttgtagcagtcatgttgagatgacacaaaataatatgttgaaattatctatttattgtttgtttgttcttaaagctgcgattgaaattagtaaaaagaaagaaagaaagatggaaaacgattagtgtgttcatgatagtacaaccaagttagtataacaaataagagatagaagagagagaggaggatgtgggaaaaagggaaggatgaccatgaggtaccaatgccacagatgacagtttgtaagggatgggaggtaatacagaggaagaggaaggagtaggttatccttttatagaaacatctaatgggtttctcaaagaccagtggttaattaaagacaagacaatatttgattgttaaaagtgaggcgagttgtatttctagtacacaaagacacggggtcctttacacacaaacacaggcacacacacatatataataagaagagagagaaagactacatatacaagtgtccactaactgtgtcttatcagcagataacctgactttaggtcacatatacacaattcattgctactcgtacacccattaacaatctctctatctcgaaggtttgtgtgtgtatttttgtgtgtgtttttgttttatttctgtgtagttttttttttattttttttctcttttctcttcctgcacacctagacaccaccctccacagttctcacccacagttgtcgttgtttttgttgttgaatagttgcaggtgtgtgggtgtgtgttatatagattataccacgtgacagcagatcaaattcactacttgccaatcgttgaaagttgtcaacctctctattgcatccgtggttaaaaaatacgttcaaattggatctcttgctcttgttgtccttgttgtctttgttcatcttgttcttcttgttggaatggttcggtttctttgctcgtattgtgagccccatctttggtcgctgttttaggtgtggctataacacgatacattctattttggaaacaacgttcatgtattctcaataagtctctatgcatcagtatactattagtacacttctctgtagaacttgacagttgaagtaatgttaacatctcttcaatacacttttcatcatacaaggcaggccattgttttgtcaatattaatctcaatgtcttcaatttatctctaattaaattcattactcttttttctgctattatagttcctctagcattaaatggaacttctacaataggggcaataggttttaatcttttcttattttcatttttccaaagaatgttattaagaaagtaacactgtgataaaattggttcaattattttgcaataatcatgtctcttctcttctatccgcatagcattgttaccattattatcatgatcattaccactaccagtagaagtagaagtaggagtaaaagtaaaagtaaaagtaggtttattatggttgtgtttgtggttactcacgtttaatagacttttctctatagcatcaggatgtccttctagccacatgtttcttaaagtggtgattttttttggattttcatttgaatgtaaaatatcataatgatactctaacggccagttgtttaataatccattatatgtgtgtagagtggtgccagatgtttttaacaatggtcgaaggtgtggtgggtatttgtatagtcctttcatatgattagatgtaatggcacttgctgtgctagcagtagatgtggaagattttgcaattgatacatagtgattatcccattggaaatatatattccatatcatagactgtaaagctttatattgtccccttttatccttcttttgataactttcttcataatctttacacaatttagcaacagtaaaaaatatatttatttcatctacatggaaattagttgcatttctaatgattattttctctaaacgatatttcgtcaatttatgaacaggtaagtaatttaaataattaattaattgttgactcaaattcttgagatgaatagaatgaagtccagtcatatatatatatgaatgtctgtatgtatgcgtatatgtgtgtgtgtgtctgtcaatagtcatcattctatttgttaccctattatgtaatggggcaatgttttgaaggacctttattatagtattttttttttcttaatgaagagtttttgaaaaaaaagaaaacaaaaaaaagttgcaatatattaacataagcaataaagacacacacatacacatacaaacatacatacatacatacatacatatatacatatatagatgttgtgtgtttgttgtcttgtataaattctgcttcatcagaaagattatcaatagtcgctatttgattttctacacttcacttttgctgtcaaatcataatacctcacacgccaaccatcttggattaagtggatcatatagtttgcttttttgtcttctttttttttttttacaaaaattactgatatatatgaagcctcatagattaggtttactatctaaattggaagtgctgctaaacaatgtataaaattgtctgttttacttttgctgttacctaagagtgtatatttcaatactaaactacatggacattcatgtatgtgacttagccttttttaattttagctttggtattccatctttactttttttttccttttttagttgtttagtaaagattattgataattatcattattttctcattctctagtcatactttgctattaggttacgattttgaaaagggttttgccttgaatataggtcagttcaattgaatcagttagcatttagttgtcatcaatttgtcgccacttactattcaattttggataactaatatttaagcaataaactctaattctgcttttataagtctgttgttacatttaaataacctcactagaagtaaatggacatataatttatgagatactctcccaataattgttgaaataatagtcctcttgtaaatttctgtttgaggcccatctagttttttttattttttttttttcaatatcatttttttttacttatacgttttattttggataatagaacatgtgtctctatagtaactcaattaacagcaacgtaagcagtcaattgtttgtttctcgttgttttgagttagttttatctagacaaacttttagttttgaacttgccctattaccgaaaattaggagtaatatctaatctatatgttaagtttctaagactctgccatgggtcatcaaaaaattgttgctgaagtggcatggtttgttaatttttgcaagtaactttttttgaaaaattcatcagctgttaatattcaaggaataatcttcgaaacagatttagttaacttaataaacttggcactgattcagttaactgatttacctcaattgttgttgattctaccaactaaaattttacaaaatcacaattttcatatatactatttttaccaagtcaagggggggatgatatattgttaatatctattcaatgttagcaagaatcattcagagtgttatcaccatatttcttttaaaaagatctgatttccaattgctgttattagtaattggatttaaaaagtatgatattttaacattggtaactgaagttattatttaaggttcggtagatcagcaaacactagagtttgtccattcaataatagaatttaaagaagaatcacatagttgataacactgtaacttattgggaagatccaaaagctatcttttctatgatatgtttattcaatattgttattgttttagaatttagggtaattattattccattaaacaggaggatgatattagcaacaattccataaagaacaactcctcttgtaagagttctaatagaagttaagttagcgaaggtgttgcgtaatagagatatgattgaaacagtttcaaattatagttttattagaggaccagtttaagaaagtgaagttcaccagtcatttatgaaagtaaaatttcagttaatgacatcataaaaagtaaagtcaaatgtaaaagtatggaatgaaatattatcagtatattgaaagataggctaaatgtggtcgtctgcgatttcagtatcattgcctcgttaaaaacagtttatattatgattaaagtaggtttttattatgttgttagagataaatactgacgaaatagttatttgatagtatgtgtacctaggtaaatattcataatggaacagaatatttttattagtaaaggatttaaagacctactgaacaagcaaaggtgggttttgaacgggattgtgtatatcaggatggatatatctaagattaatgtattgttcttgctgctttatacaaaaaacttaaattgaagttgtgttttataatagttggtcttttcaacagatgatacataggagatatgatagattaggacaatacggaaaaatgtaaaatatacatgtcaagcctttggcttttggtgattgagatagatatgagctaaatatttttgcaaatattataatgaatatttgattttgggaagtagttgtacatggtctaatagaatttaagtgaatattgaataaaaggtatcgtttaagagactaaatttatatctaccgatattctacatttagaggagtataataaagtaaaatataaaaatagtttcattttaatttaatagtcattatttttatttgaaaatgggcatttatagaagggttattaaatatcttagttagccagaatatttgctatttttaatgattattatgattatgcaactcttaatgtttaatattttttgttctttttttttctggatgaaagggttttgtatactgttggatttcatatattttgggtcaaaacattatgaattatattaggtatattcaataatattaactacaaaaatttattatgttgatatgcaataatttaaagattttgcctcttgatgttttttataggataaccaaaaaataaatacatataaatcacataaagttatatattacgttttttccatctagattggaaatttataaaaaaaaaaattctaaggtgttattgtagtaagtagtcatgatttcttgttcaagtagttgagatgtttattataatttgagtcccttcgtattttttatacagtgtatagatatatataattacataaaatgttgagaaagatattgtaaagtttactttttgacatttctttttttgttcctaaattaaattccaatttcgaaataaatattttattctcaaatattttttagacattggttttttttctgatctttttaaagatatgattgaaacttcctattggtttatccttaaatatcgtcttatattattgttgcaattagatgttctaaaaaatagcaaatagaacaatgagattttattagatactggatattagaatgtcttccctcaattaaagcagtttatttattatgtaataatatggctcatcttaatcgttttcttaaatccttctttcatttaggtaattgctaatatccacggtctttacttaatcatagttcttctgccaatgctactaaatttgaacaaactaccaaagtatttgattgattgactccatattgtaatattaatagactagtttgaatcattgataatctcaggtagtcaatcctattaaagaaagtggtatattctaaatcagcacattaggatctaatttgttaaaattattgaactgagaatagaaattctataattgtaaagctagttaatatatcaatgataataaatgtgttgttaattttttataagatcttgaatatttttctaataagatttttttatgtaagaatgcaaaatatgggtgtattaattcaaagaagatatcaacgagtctcttcccatgtggataaattgacatttcaatgataaaaatttctcattttcgtattatatataattggataaaattatcttcaactaaaaacttggtaacataaatttttataaatttgttatattaattatccaagattacccatctttacatttatttatttttcagtatctcatggtgctttcaataactgaaatcaacaaaacataaaaactttttttaataataattagaagtatatagcacaaaaaaaactaactaacaacatgaattgagtaaaatttgttgagaatgagtgcctttattcattggatatatagtaaacattctcaatattatattaaacagatttagtatacaaaattataataaagtccttcactttctttctctatatacaacatagaaataataatatacaaagattgtaaataagataaaaataatgtatgatgaaatccttggctttatatatgttaccattaagccattttcctctacgaacggtaagatatttaataaacaaactcgacaacttttggtgacctctcaccaattattactcaacaatttatcgtttagtgtctgctaaaattttattgttcaatctattttattctagaacagtctatttcaacaaaaatatttaattaaaaaaaagcagtttatacaaatttcaatgatcatgatttattattgtttattactatttagaaataatatataataagcataataaacatgaagcacaagttaaccgactaccatatataaatcagagataactaatgaaagatactttttagactagcagccgactcatcataaaaattgtaatatcaaccctatgtttcccctccagtctgacttatctcttgaacacaagtatgataaacaagaagcattatctaaaatctaatatataagatgtataaatttagtagtattgaattttttacttgtattattttctataacatcttattattttattagatatatatcaattttgataccttagtaactggagaacatcttactaaaagagaatctacattattaaaatatatacatttaataatattacgctaggaatatgtgttttcaataataatgtagagattcatttttgctagttgtagtttctttacttttgcaagtatctcatataatatattaatcgtctatctagaaaaaaaatttttttgtgtaacagggattcatgaataagcaatgagaaatcaaaatttgtactattaaatacaagaaatcccttaatacaatattataaacatttatttaacttcacattatcatatataaaggaagtggtacatttctaagtaaacaaaccacattaaaaaaaagaagtatctgatttttataataagatttttctcctatgatatcaagaagatggactttatgtataatattgtttaaccccttttattagaaatttactaaacttttgcaagaaatgatacatgagaacttagcaatattttataaaaatgctttctgaagcaacaactgctccaataattactcatgtcttttgatacagatgatctaaaaagcagcaaaaaaaacactttagatatacaaatatttcatgaattcaatatatgtatatatatataaacttcttttcgttattgtgaagctgtagttatgcaaatcaaacaaaatcctttacaacaaacagcaaagcatctgtttaaaaataatcaatgcaacacaactcaagccgttttgggaaccacaatatattgcttagatttccttaatcaaaactatcataaattagagattgtaatcttctctaaaaaaatcaaaaatatttcgatttcttttttggggatacttcctacagccttttttccccctcattttcaaccctgaaattttcttggaattacgaaatgtggtttttatgaaaaatatattccctaatctaacacctatgcaagaatttgtatgcaaaaaacctaggtgcagaataaaaaaagaatgcaaattgtaaagtttcctccccaatgggggagaaagggggggtacacaattagtggatcctgatatttttcgatggatttgagtaaaaaatattcttaatctattctcaaaatttaaaatactaaatacaatattttttaggaaaattggaatcgaatctctacgttacatggtaacaccctctcttctattacatcaataagttttaagagggaaaaagtattttattcagtcttgactactgtaaaaatgcagacatgtgaatattattttcttggaaaagtggtggtgtttgtaattaacatcgtcatactttaagttattattaaattggatttctgatttaataaaaaccgatagaagtaatatgcacaatttcatacatcatgttcataaataaaaacaaattgatccttttaccttttttgttatcattcttaacgatgtaataaaagcaatgcttaacttaacttaaatggaaatattattcattttctaccaatttttttaaaaaaaaaaaacaatacatgtaagattcacaatgtattcggtacatacaatagggaaatcttttatgcgcaaattttcgattaaccgttaaattgaatgtttttttgtatgttaatcatttgttctcaaaatttatccgctctatagaaaaaaatcgagattacttctcggataaatgcattttagtatcataaaagccgattctattaatcatgtacattctagaaaaatggcgaaaaatttttttttaaataataagtctttccgaaaatgttttttttatgtttacaagaacaatatgtgtaaataaacacgacatctccatactctataatctccacttttatttattgtaaatttttaagagaaatagggcaattctcataacaataaatctgtgcattaaagcaaaaaacaaaatctaaattaattatttcctgaaaggttccattgttattttcctgacatagacaacttaaataaatcaataagacaaaaaaaatttttcagttccatacacctcacatgctttttccccaatcctaaaacatttagctagttgctttatcggtattaataaattgttaaatctaacattcttgccctctgcataacttttttagctctattttctgaacaaaacacagatatagatagggctgttgtgtattgattagttaattagttctaactagatatgtgtgttcgaaactctaacaaaggtgtatattatggttacaagacaagatctaaactggatcttcctttttaaaactctttacgaaatttttttttacatttgcctcaaagcaattttaacatttaaacaattactggttatggttagaaaggtgatattatcactatgttgattataattaaaataccctgatctcttgtgtatatagctctaactgtattatgtagaaatgcccctagcaagttttttttttgttattttgattttcaaaatagactaaaaaagtaatactaacacctgaaaaaagatccagtagaaatcttgaaaaaaagaaaaaaagaaaaaaagaaaaaaagaaaaaaagaaaaaaagaaaaaaagaaaaatagaaaaaaaaagaaaaaagaaaacgaattggtaaaatacaaaaaaattgtgcttttagaattcattatggaatttttttcgtaagccagaaagatacaaaactttatatttttcctttcagaggaagactgttaaaataaagattccaacactatttattggatcgttacaaaaatatatccttaaatagaagcttttaaaaatttactccaacccttactgtaaattagcctataactaactttttttagattgaatcctaataatagtagtgtgaacagtctcaaatatacaaagataaggcaaccataaagtaatcagccactatccttgtctaagtgcatcaatacctattttaacgtaatttacttaacttaagtcatttctgaaaccgatgtaaattgaatggtttccatgatgtcttctgcaaaccctaacgtctaataactatggcccattgggaaaatacagaagctttctttatgccctatctaccttgtagcggtattatacatgcgaccttttttaatccggaaaattccgtccctaaaatttttccagatagtctccacttttttaatctttttttctgtaagctcggaacatcggaaaactgtactgcaaaatgatcttgtacctttgaggtaattgaaaatcgaaaaaaaataaataaataaataaaaaaaaaccttaatataaccttccaaaaatactaaagttttacagatactatttttttcggacgaaaagaaagttccactttttttaattagagaaaaaaagaaaaaaaaaaggaaaaaaggaaaaaagaaaacgaacattttaacgtcctgttttatgattttcataatgtatgacacaataaattctgcatgctgcataataatacaaacgtttctattgtattcctcgtcgttttcttttattgccatttttagtaaaaggagaacaaaaaagcggataatcctaacaccgaataattccgtcctgatcttcgacagtgaattttttagggaaaaacaaacaagaaaaaaatttttagcctttcaataatactaaacttttgcaaatgatctttttcggatgaaaagaaattcctatttcttaaagacaggaaaacatacattctatcaacatatataccacgatttttataacatacgacaccatgaattttgcatattgcataataatacatgtggatctattatactctcgagttttttcttgaattaaattttttaattagcaaggttattagaatctttgaaatttgcattactaagtgaaaagtcctcaaattaaataaaaaagaaaaaaaaagaaaccacttccaacagcgtatatcatgttatgaaccacaactttctaattaattcctcaaatataaaagggtgtcatatccaaacatttgattttccaacatgatcttaccttccacttaaaaagtcttatcaaaattaacttctctcggaactatacacaccacccatcaagaagaaaaccaaaaactctactgcacccatatattatttataacgttaaaatatcatcttactaaagtttacgatagatagacgctcttaatttttttttttctttttattttttttttgggtacaatcatatattttcaatcataataatacaatatgttgttgtgttataagaactttgttgccatattattatggttacatatacatttacgatttgctacagcagcctatgcaccagctgcatgttcagttccaagcaacggtaccatcggggccactgttagattttttcagtaccgtattcacgataaaagcagttatcaacaaaaaaactttttactgggtggttatttaaaaaataaatacgtaggtacaattacaggcgttacaaatctaacatggtattcaggtaatgactggaccattcctccatatggttacacaggtgttcctataagtaacttcatgatggaaattactggttattataaagctccactaaccggtatttacactctaaacgctaaagtggacgattctgttacagttttcataggttctggtgaagcatttgagtgtggtaaacaacatgtagattttgtctctcctcaatatctttttacacttactggtagtgtaacatatggtatggatacagaagtacaaactatatatatggaagaaggcacatattatccatttaaacttctatatatcaaccagaatcagcaagggttattagatatttcaataaatttgccagacggtactatagataaaggtattggtagtaatctatacagtattcccgatgaaagcttcactaacacttcagatatttccttcacgtatagtggatctacagcatacacaacaacaacctctacaatcacaaacacagtgcgtggtttgaatgcaaccacaactactcaaacaaccaccattacgacgatgcttaattcttataatgaagaagttatagttgtttactatgaggcaattcctgcccctatgttaactacatcctacattcctggattggtaggctcctcttctgctttctccacttacacctcctacaccaccgactccaatggaagcagcagtccaattgaagttgttgttgttgagactccaatgaagagtaccattacagcatacagtttagggtcggtcaattcaccttctaccctttccacatacatttcttatgtaaccgactcgaatggtagcagtagtgcggttggtgttattgttgttgagactccaaaaccaaaacaaattacctcatacattccaggtatcataggttctgcttcagcccaatccacaatcacatcctacaccactgattccaacggtagcagcagtgaagttgacattgttgttgttgctaccccagttggaagcactgttactgcatacactgaaggtctagtgggctctgcttctgccctttcttcctacatttcttatgtaaccgactcgaatggtagcagtagtgcggttggtgttattgttgttgagactccaaaaccaaaacaaattacctcatacattccaggtatcataggttctgcttcagcccaatccacaatcacatcctacaccactgattccaacggtagcagcagtgaagttgacattgttgttgttgctaccccagttggaagcactgttactgcatacactgaaggtctagtgggctctgcttctgccctttcttcctacatttcttatgtaaccgactcgaatggtagcagtagtgcggttggtgttattgttgttgagactccaaaaccaaaacaaattacctcatacattccaggtatcataggttctgcttcagcccaatccacaatcacatcctacaccactgattccaacggtagcagcagtgaagttgacattgttgttgttgctaccccagttggaagcactgttactgcatacactgaaggtctagtgggctctgcttctgccctttcttcatacatctcctacatcactgactccaatggtagcaccaaagccattggtgttattgttgttgagactccaaaaccaaaacaaattacctcatacattccaggtatcataggttctgcttcagcccaatccacaatcacatcctacaccactgattccaacggtagcagcagtgaagttgacattgttgttgttgctaccccagttggaagcactgttactgcatacactgaaggtctagtgggctctgcttctgccctttcttcctacatttcttatgtaaccgactcgaatggtagcagtagtgcggttggtgttattgttgttgagactccaaaaccaaaacaaattacctcatacattccaggtatcataggttctgcttcagcccaatccacaatcacatcctacaccactgattccaacggtagcagcagtgaagttgacattgttgttgttgctaccccagttggaagcactgttactgcatacactgaaggtctagtgggctctgcttctgccctttcttcctacatttcttatgtaaccgactcgaatggtagcagtagtgcggttggtgttattgttgttgagactccaaaaccaaaacaaattacctcatacattccaggtatcataggttctgcttcagcccaatccacaatcacatcctacaccactgattccaacggtagcagcagtgaagttgacattgttgttgttgctaccccagttggaagcactgttactgcatacactgaaggtctagtgggctctgcttctgccctttcttcctacatttcttatgtaaccgactcgaatggtagcagtagtgcggttggtgttattgttgttgagactccaaaaccaaaacaaattacctcatacattccaggtatcataggttctgcttcagcccaatccacaatcacatcctacaccactgattccaacggtagcagcagtgaagttgacattgttgttgttgctaccccagttggaagcactgttactgcatacactgaaggtctagtgggctctgcttctgccctttcttcatacatctcctacatcactgactccaatggtagcaccaaagccattggtgttattgttgttgagactccaaaaccaaaacaaattacctcatacattccaggtatcataggttctgcttcagcccaatccacaatcacatcctacaccactgattccaacggtagcagcagtgaagttgacattgttgttgttgctaccccagttggaagcactgttactgcatacactgaaggtctagtgggctctgcttctgccctttcttcatacatctcctacatcactgactcgaatggtagcagtagtgcggttggtgttattgttgttgagactccaaaaccaaaacaaattacctcatacattccaggtatcataggttctgcttcagcccaatccacaatcacatcctacaccactgattccaacggtagcagcagtgaagttgacattgttgttgttgctaccccagttggaagcactgttactgcatacactgaaggtctagtgggctctgcttctgccctttcttcctacatttcttatgtaaccgactcgaatggtagcagtagtgcggttggtgttattgttgttgagactccaaaaccaaaacaaattacctcatacattccaggtatcataggttctgcttcagcccaatccacaatcacatcctacaccactgattccaacggtagcagcagtgaagttgacattgttgttgttgctaccccagttggaagcactgttactgcatacactgaaggtctagtgggctctgcttctgccctttcttcctacatttcttatgtaaccgactcgaatggtagcaccaaagccattggtgttattgttgttgagactccaaaaccaaaacaaattacctcatacattccaggtatcataggttctgcttcagcccaatccacaatcacatcctacaccactgattccaacggtagcagcagtgaagttgacattgttgttgttgctaccccagttggaagcactgttactgcatacactgaaggtctagtaggatctgcttctgccctttcttcatacatctcctacgtcactgactcgaatggtagcagtagtgcagttggtgttattgttgtcgagactccagctgtcagccaaatcacctcatacatcccaggtttggttacttctgcatctcctctttctacatctacttcctacaccactaactctgatggaagcagtagtccaatcgacattgttattgtggctactccaagtatagctccttcaagtctaggatatcattactggaattcttcatcaacatctacagcattctcatattctggaatggcagaatcttcaaaagaaaacactgcagctacaagaaacacagagactgcaggaagcaataattggaatactaataaggctgagccatcattgtcattatcaccttctggaatggcagagtcttcaaaagaaaacactgcagctacaagaaacacagagactacaggtggcaataattggagcactatgaagattggatcatcgtccagaacaaacggggttgaaactgaagcaggttcgttggctggaactacagtaaatcctctacaggttgctgtaactcaagaaccattacacgtatcttcccaaaccgcaaagccaagtggcagatcaagtgcggtaacattgtcacagtatgaagcttctgctcctaccactgcagctaaatggtcaagctttgcattggcactcttctctttgcttccattcatattttagttgatttttaaacgatatacatatatatcttatatataataatatttatttataccctatttttcatttaaataatccatttgcttctttagttttttttacttaccaacaaaagagaagataactaacgcttcagcaatgccaagaacataagagcttttctttttaatataatgatatatcgattccaaacaatcacttatcttgttatttgattaacctttttaaaccttgcatttcctgatatattcatattctatttgacaatcgttatcattaccgttactataataactattgccaacagtaatatcttttgagcataaacatatatattacatatttacattctttaaaatctatcaaaatatattgactaaagaccacgtatgccacttttcttcttagaaggcttactgttatatgtattcattggtctttcatgatccataatattttgcttgaataattttcaactattttatactacaaatctctagagataactactgtaatataatatgcttctcaacaaaattttaattatttgttaaatatatttcttaacaaaacagtagttgacaaagaaacacagtaagaccactatctactttctaggaaaatcctatactgtttaatgagatatttatcagacttagagataagttcacgcactactattttatagtgaatattgtaacatcaaatatatttcaataagattatttatctaaactgcactacagcattattatagtaaacaacgcatgttgacaaattgcgagcatcaaccatacatctacgcttgaaccacattcttacttaatatctatttatgttaacaaatcaaaactatatttcttatagcggatatgctatataaattagtttttctatatcacacttatatatgagttatgttgataattagtgtctgtatttatttgatatataagtattcattcttaattattattattattattatatatttatattatacaacatcatgcttaaattcttcaatcttctgctgcatgtacaatatagagatgaggatatataaaaagtctacaaaggataagaacatgatatgaatacaacattcgctttacatatgctgatttttgatatatttcctctaggacgacaaaaatttatcaatttgtctttttttatatctattgataagtaaatattacatgctttgcattttaatggagatttatattcactaaaagctgcttagtccatttattcactccagaacatccaatttcagtaagctgttattatttttttattccaattaatgaatttgttgaaataagattaaaaatggtatgtgatgatctaattttttcgtaccaaatgactgaaaaatcttataacagcatataaaaaaaatattaaaataaaatgtgttataacatatatttagtcatatatgtatataaaatatgtaaaacagaataaaagaagttatacaggaacaacttataatactaccaatatcctattataagtttttatcatcttattatattgatctaaaatgaatgctagtagaattttttatactgaagccttgcatcaataggttacgagccctgtcgtaacggctgtaagttatgttccttttaaattgaacagaaaaaagaactttaaaaaataaattaatattttagctatacacatgttcaatctcaacctatattggtgtcaataggcgtaaaatggaaggctaaatgtcattgttgaacaatggaattcatccaatgatatgattgcttatattaagaaaatatttgaaacggcattaaaattattaattgttaataatgttcaagggtccgctaaaaaggaggcagatagatatgttgctgatgattatgacattttgactggaaaaagtcttcttaatcacttaactgagtgtttttgtggagaatctattgatatagttaccgaacctttttttcaattagctaaagctagggatttagcattagatgactagcatgacctagctaactgtttagtggaggttatctaataaaaaaatgtttttagcttcattaacttcagaacaacaaaaactctaaaagtaatcaaaattaaagtttgtgaaaagactactccattatttttaatgaatttatatggtgaatcttaccaaagatttataaatatatttggtaaaaattacgaaattaagttgagaaaagtgtatgatgtgattagcaatattgaaagagaagtaactaactccagtcttattggaaaaagaaaccaattcaaaccaaaagttaaaaattttaactttaagaattgccggggacaatataaaactaatgagtgtccggaatttcaagaatgattgaaggccaaaagaaataaaaaatatgaaaaagatcacaatattaataatcctcatacagcttgggttgcgttggttagtgaacaaaagacagcatctagaaatgattggtattttgatactggttgcactcagcacatatctcacgacttttcgatgtttagtgagttagtcgaaggtaatgagaatgagtttggggttatcgaaggcattgggggtaaaactgctattaaaggtattggtacagtacaactaggacatgtcacattatacaatgtagcatatgtcccaaatggccacgtaaacttgatctctgtcaaaatggcttctgctaagtcaaacatgaaatttatatttgacaaaacaaaggtattttacaattaaaaataataaaattactcaaattggtgaaataagaaatcaactttatgttttcaagtccgataataatgaaacaaaaattatgaaaaaaccacttgattatacttttatttcgtatgaccattccgttttaccatctccaaaggcaaaagttccagaagttattaaatggcatgctagagtaggacatccacgtttagctaattataatcgattggcaaatcgaattgacctgtccattatggaagctgataaacactcgttgtgcctcacttgttccctttcaaaaggggcgatgaaaaaaggaaaaatttctgacacacaatacacgagtcctttacagttattacaagttgacatttgtgaccaatttaggtatactaatttttctgataataaatattttttgactatccaggatgcctactcaagatattattttgtgattcatttaacatcaaaatcagctgcatgcaataagttgattaagtaaattttagaaacagaaaataacttcaaatcaaagggggatttaaggtgggtgccattcgtacagataatggacgtgaatttatatcaactaaatttcataatttctgtaaaagcaatggaatttcccatcaattaactgttccgtacaataattttcaaaatggggcagtagaaagatcccgtcgcccgattgaaaaaaagacaaaatgccttttaattggagggaaggcacctcctcccatgtagacagaggctgtaagtactgctgtatatctcttaaataggttaccagtatctaataaaaaatattctatcccttactgtctttggaacaatattccaacaaaaaatctaaatttatcacatctacgtatatttggatgtgctttatatgctacattacctcatcaattacatgacggaaaatttgctcctattagtgtaaagtgtgtgtttgtcggatatgactctaaacacaaagcttaccgtctctaccatccaccctctaagaaaatttttgtattaaatcaagttcgctttgatgaacttgatttcccacttgcaggtaccaaagaggtcgaagcggctcatacatttgccactggtactttgggtggtatcccaatttatccttcatctactgatgctttcacaactcagtcttctgaaatacaaacttcaaactattatcctgacactactgattatcctatatatgagggcaatttacaaaatgaattaaccaccatacatggtgatgaacttctagatcaaggtactagtcgatactccactccgtatctatcatctgctgattctgattcttctatgtccagagttgattcatctggcaatgataagcacgaatatgactcttcttcctctgatgaatatgaactaccatctacttccttctcttcttctcctgtttctacgacttttgactgtgaaaattttactttcaacaaccttgattcatcttctatagacaatgagtcaactgcctcattctcctcacataattctactcaaataaacaagaaggaagcagacgaaccatcatcaattgcttcatcctctgatactgactcttcaattactccaacagctgattcactaactactcaacaattaacatctaccatcgatgatatccactctgacacatcttctcctaattcacaatccagatctttgtcaagtgatatttcaccggtttacaacttagaagacttagatccccatgaaccattaaaaaatagtaaaattgaattagctgacaacatttccgcccctatcaccacacatgttagcaagttgaatggccaaacatcctcaactgttaatcataacaagttaggtcttattcctgcttctgaattctacttaaatcaccaaattgggaaacaccatccaaagtgggattctaattcaattagtcctggtacaattggtatccctgctgttggggctgttaatattgactccggcagttttgttcctgtgaactccatggatggtctcacccaactcattagaacacctgtaccctgttcttctcaatcatctggttctgatgataatcctgcacaccacatagccttgactgcgttagttcatggcatttcctttacttctaccactacttctgtcccaaatacattcaaccaggtaatatattcttcagatatggacaaatggtatcaagcctgtctgaaagaacttcatgcctttaaagagcatgatacgtataggttgattcctctctctcctggtcgtcgtgtcttgagttctcgttgagtatttaacattaaggatgggaaccggtttaaagaacgtttagaggctcaagggcacactgaaaaaactggtatcaactatcaaaaaacctttgttcctgcagtgagatataattctgtctgtatctttcttgttatctctgttctctttaatctccgtgttcaccaaatggatgtagacactgtcttcttaaattccaaaagggaagaaccaatctacgttcatcaacctccaggctttgttgattctatacatcccgattgcgtgtggcagctttacgggggtatgtacggattaaagcaagccccactattatgaaacacacatattcataaaacattaaccaacaaagaatccacacaccatgatggggaatctaacatatattttaaaaatattaaaggtgcgaaagtattaattgcattgtatattgatgatctcctaattgctgctctgaacaaaaatattatgagctctgttacagcagggttaaaagcagtatattccataaaagatctgggtctagtttccaaatttttaagaataaatattcaccaagatgacctgaacaatataaccttatcagtagaggaatatactactaaggcaaccgaaagttatcaaattgacttgaatagaaatgtagaatttccattatccaatactattaattatttcgacactgaatctccaacaattgacaatataaatgagtgacaaggtattatttaccaactgatgtttgtgagcaattttggtggatgtcccgatgtagcccatcctgttcaacttctatcacgattccttaaaaatcctaaagaggcacatttaaaaagcgcatgcaaagtaatacagcacatatataacactaaaaagctaaggattaacctacaacacaaaacttgaaagatatattgaaggtttttttagacgcatttcatggaaataaaatatgtaactgataggtttattataaaacttgcgggtaccgtggtgacatggtcataaaagaaggcaatgagtgtagtttgtctttcttcaacagatgccaaatatatcttcactagcagtattagtaagaaacttatttgattagaaaaaatctgctggatcccatgctaataagtgcaaaagataattaagctgttgatagataacgaaccagccatttatgtagtcaaaaatttcatgttatattttaaaatgaaacatacggtagtttaaattattattttctgagacgccaggtggactttggaagtattgaggttgatctcattaacacagctgaacaaattgccggtataatgaaggagatcttaccaggatctgtgttttattaaggttagagatttgtttatgaaaaccatagaataagcgatgtgtaaatatgattaaagatattgttgataaactagactcattgtactaaatgactgaaaaaaaatttataaatatgtataggcatactgtacaattcgttatatagaacatagagaggtaattgatataatataggtctgtagtacggctaaaatcttattatgggcttgtattgtttcatcatgtcaatttataacgaaataatgaaatttagtagagtttttgctactgaagacttgcatcaacagaagaggttacgatgaaataggacgagttcatgattaattcaataattggaacaaaaaaacaaaaaataacagtttactgaaattgactattctggaataaacgaacagaggaaatagattttagtaaatataaatccctactaaaatgcagagcatgtaatgtttatttagcaataaatgtagacaaaaaaaaattgtgataaatttttgccaccttaaaagagaaatgtcaaatatcagcatatagaaagcggataatgtttttataccatgttcctatccttttgaaacgttttggtgtatcattattcctatattgttcacacagttgaagatcgtagaattaaagtatgatttttatacaatataaagatataatgtaaacaatagctgaggttgtatatataaggtgttatcaaaagtgatgtattaaagtagggatattaatcatatatatataaatattgataaatttgttggaatgattatcataatcatcttatattaaagactttattatggcaataatgttacgtgtagtgtctgatctgaatgtagaaaagaaaagaaaaaattttcaaaagagagagaagaaaaggagatataagaagctaatttattcacttttatacaacacatacgtaaatatctatatagtatgtacaaacaaatgaaaccaacaagaaatatatacaagcaaaagtatctaatatgttcactgattaaggtcacaagcgtccagtaaggtagtgtcgcctttgtaagtcttggaactaaatcaagactagattcttttcaaactagacatcggcaattaaacaaaaaattaaaacaaattgatgctaaagagagttgcttattaaatattgaaaacatcaatgttgacagtttagataaagagttaaagaaatatcaaaactttagataaactcttaataatattattcaagaagctgaaaatgaaataaagactttaagagagaaatacatgaaagacagacataataatataacaaataataattatgaaacaaatactttcaaatacaataatcaaaaagattttgaaaaacacaatagacaggaatatttaaagttttgacatatatttcaataatactattgagatgaataatgtaattaaagaaaaattcttagatatatatccgaggaagataacaaataaaatctggaagcgtattaaaattgatcagttttgtactgatagatataaatacaagagaacaattcaaaaaatgcaattatgagaggtctggagttttcaagaaacagatcaagaaaagataacttcttcatttatcaataaaacaaagtagaaaacaccattgaggataatttacaggatatgttattcgaatatataatgtacaataagattcaagctacttattcgatgaatcctactggacgcttgtggccttaaccgttgaacacattagatcttttagcttgtatgtatttcttttgaaaaattttctttttcttttatacattcaaacgtcacatataacactgctgtcatattaaagtctttaagtgattgaaaaaaaaacctctttaatatacaatagttatgacgctaattccagcggatccaaatgattatgtgcatgctctcataagtaccatcaaaaacataaaaataaaagagggcatctcagaagaaagactgaaatattgtgacttttacaggtcaagctttcatcactctaaaaacttgtcctaatagatccaaaacaactaattcataaattacgtggacaaaggtcagaaaaattgtacaataaagtgaaaagaatcaatcatcatcaacacagaatacttaataaaaaataatagaaaaaaattaaaaatcaagaagatataaaaaaaatcattagtcactacaatagtaacatcattattaacaatgtgaacgttcaacacagtactactataccgaatactaattataaagtacaagcaaaaagataaaaaccgttagaaacaaagctcaaatatttaacaaaaaaataattagtattagttgatacagcttctcccattaacttaacttcagataaaaatctattattagattttaaagttatcaaagacgctcttttttatcaagtggtaggaaataaaataattaatattactagaagtggatatttaccaatcattgaaggtgaaaattagataaaatatttatatacatattacacttcagaaggagatgatgtaattatttcagctgatcaattaagaagttcatgtagatatcactttaatgaagactttactgaattaaaatatactatcaattctatgctagttaaaattgtagatgacatcatttgttttgaaataaatggcattatagttgacatgagaaacaattcacaagacacaaacaactctaataagataataaaaattaaaacaattttaaaaaacaaactcaaagaaagtattttctttgttaaagtgcattaaaaatttaatcgcatactttcttaagtcatttggaagagtattggtattaagatatttgatgacgcagactcaattgaagaaaatgcaagaaaaaataatttatggtacgaaatatattgtgcaggaaaaatgacatgacatttccactatacagactcaataagtcactatattgaacagaaacaaccagaatcatcatggagtttgaatatatttggtccagtcaatgatgtatctgcaacttttgataaatgtatactattaatggtggaaaatgttagcagatatcttataatatgtataaaaataaaaatccagatacaattactgactaaataaataaaaatatagcatttattaagggccaatttgattgttgcaggatctattatcgatgagaatcagcatttacgagcctaaagtttaaatccttactggaaaataaagggtttcaattattttacatttcttctcaagatcatacagctaatatataagcagagagaaatattagaacaataatcatagatgttcatacattacttctccaagctaatttatcaataaatttttagctttagctgccgctctggcagctaagcttaaaagctgcacatataacaagaaaatgcacactgctctaactattattatcttaaacaacagtgttagaatatcactaaggtcgtttttacctttcggaatatcagtgttaaaatgggatcgtggtgtcaataaaacatgatctcctgggaaagaggtcacgacagtatgcaaaaatttatacagctttggttatttctgctatgtttcatattacagacaaataattttagcagctaattatgaattcccgacaattacatctaatcaagaaaataataataacattaacagagaaatttttaaaggactaagtgataaaacactaagcctatatattgatgaagaatgtgatgcaattaaaataaacgaagtaatatcaattcttgaatccactttcccagaactaatggctttgttataagaagataaaagactaattaaagaacacctgataagatacattgaagacgataaaacagatgacagaaataatctaataaagaaagatctagtatatatagatcatgaagatttggggaattttttgaaaatagtaatgaaaagaaatagaataattaagagtttcaaggggatataaatcaaggttataatgaaactaatcttcaatgttactttatatgtttaattgtataatatcttcattctttttgcaaattaggcttatacctaaaatgtttaaatctaatacatcgttcttcattacatcaatctcttttagtgaaaatttatgcttcatcttttccatatactcatctattagcttatcagatgtagtatgtaaggaacttaactgaaaatccagtaaataagcaattccgagggtaacacctgagtgtctgggtggaggattggtacagccatgtgcgcagtggctcgtataaagtattgaatctgattggaggatttccagggagtgataattatatcagatcttgtcaggaggcctttgattattgagagatataccaggggtaatcatcttatttaaatacatcttagtaattatattaagaggtaactcttaatatcatacaagactaagaacaacagcaagaagtaataatactgcaacagggttattaattagtgatatatagagcttacgtaagagtgttatacttatactaattgatatgatttatccatttacatacaacaacttttatatagtagcaatgacataatcatctatatacatttctattattacatttccgtctaagaatacaaataatcctggtgagtaagcagaatcatatagtctgattgagttcatatattgtttcaatgtgccatttcccctttttgggctttgctttagcccgtatggtaccttttttaaaggtgttacataacattagtcttccaagtgtgttatgtgtagttttgtatctattggaacataaaaaaaagcatgattaatgtcaaaggttcctaatgacatattcttattgtttgcaataattaataatagtttcattaagtccatatttaagacggatacatcaatcttgttataacttctgccatcttgtaagtcttctctacaaacaattcattctttgtgcgtaccatctcttttaattgcaaaaatagtatttgttcttttggttttattttttggaacttgagattttggtattttgatatcaagattaattgcctttataccaattaaattattttgttctttttggtacatttttaaaaacctttccttctattccaaactcttattttttgtaattgcctgtttacagtaaagaactttaacttttggaatgtgctggggataaatttttttaactctacgcttctagtgactttctttgataaactttttattttcttcgtattgtggtgtattgtcttttaattattgatcggctaatgactctgtagtttctataactctttttttaattagttgacacttcttatcgagtaaatcaggaagtttatcattttttattatagttggtttattataaagtgaatttctagttttaatatatgatgtacctttctttgtggtgggtaaatacacatctttatttttttttttaataatcagccattgtcttcattcttttcttctagtttattagtattaatcatttatggttcttactcatgtcccatctgttggcacatagaaggtgatattaatatattcttgccgtttaattttaatgttatctgagattaactatgtatttgtttgttgtggtatgttgttatctatctttacagtcgtttgtgactgaggaattaagtttctatttatttttaaatttaaatttgatattggtattgatggtaacagtttatcttcctctaattctaaaaattatcagataatgaatctagttgtttgactggattttgatatgatttaaggcttgtggttttattaatttttttcataaactgtcatttttccctttccaaaagctttttgtatcatattatcaccaatagtttgtgtacaataatatctgatgcatctttagcctcagaataagacttaaaattgtgtgggatgcaataatctggtcagaaaagaattcatttcatgcatttcttaagaaaatattaaaagtatgtgattcatcagctgaagcagaagtaggtgtaatgaatacaacagcaaaaattagattattattaaaattaagatgagaaaataaaaatatttgagaaaataaaaatatttgagaaaataaaaataaatacaggattaataacagacgcaaaattaggactgagttggttacaacaagattatgtaaagcccaaaacaacattcattggaataagatcggaaagattaaaggatcaagtcaaaaataatgaaatagaaataaagaaaattgaagataagaaaaatatagctgatccatttacaaaaagcgttctagtaggacaatttgagcaaacaaaaaaaggaatactggggcatgagttgacaccaaagatgttatttcaagctacctcttagattgagtctggaactatcagatatttatgacaacaatgttttataggagatgattggatgtataaaagaaaaagagaaacatataaagccaaaaaatttaatctactcaacagttaaagccacaggtgtccagtattgataagaattagtgctcctagttatcggataaatcgtatacattctcaatattatatcagatagatttagtatacaaaattataataaagtccttcggttttttttatttatgtatataatgtataatgataaaatatagaagatgatcaagggaagaaacatgatataaaaatatataaagctatcattttcaataactaagaacactaattctcaacactgataatttgcattgttatattcttgcaattatattaaacatataattctcactttactaatgtggaaagactacacccttttaattataagactatcactactaacatattttattgaatgtctactttgctatgttattgtagaatattaaaatgtgctggaaacaaattgctaattattgatctaaaattacataggattaataaaatacattattttccgatatgataatttaagttatataactttaattttccattacataaaaactaacctgattattgacgttaacttgtagcaaaacactacctccaatatataatattcaacttacacaagaaaaccctttgctgtttcattacatactttcattaaatgtaatatgagacatttattatttcttattaattaatgataccaattctaattgccgtggttgttccagcaaatttatctgataaagtccgtataatagtaatgataacgattgtcaaatagaatatgaatatatcaggaaatgcaaggtttaaaaaggttaatcaaataacaagataagtgattgtttggaatcgatatatcattatattaaaaagaaaagctcttatgttcttggcattgctgaagcgttagttatcttctcttttgttggtaagtaaaaaaaactaaagaagcaaatggattatttaaatgaaaaatagggtataaataaatattattatatataagatatatatgtatatcgtttaaaaatcaactaaaatatgaatggaagcaaagagaagagtgccaatgcaaagcttgaccatttagctgcagtggtaggagcagaagcttcatactgtgacaatgttaccgcacttgatctgccacttggctttgcggtttgggaagatacgtgtaatggttcttgagttacagcaacctgtagaggatttactgtagttccagccaacgaacctgcttcagtttcaaccccgtttgttctggacgatgatccaatcttcatagtgctccaattattgccacctgtagtctctgtgtttcttgtagctgcagtgttttcttttgaagactctgccattccagaaggtgataatgacaatgatggctcagccttattagtattccaattattgcttcctgcagtctctgtgtttcttgtagctgcagtgttttcttttgaagattctgccattccagaatatgagaatgctgtagatgttgatgaagaattccagtaatgatatcctagacttgaaggagctatacttggagtagccacaataacaatgtcgattggactactgcttccatcagagttagtggtgtaggaagtagatgtagaaagaggagatgcagaagtaaccaaacctgggatgtatgaggtgatttggctgacagctggagtctcgacaacaataacaccaactgcactactgctaccattcgagtcagtgacgtaggagatgtatgaagaaagggcagaagcagatcctactagaccttcagtgtatgaataagctatataaataacatatataattatatagaatattatttatacatgagtacaaattgatccttcattttttttattttcctaaatttttttcgagaacaaaagtgttttctcttttgatcatcattattaacgacatcataaaacagtctttaacaaagaaacctagtaagaattatgtccatgttctaacaccctcttataatcaaaaacaataatgataatatatcaagtaataatattaacaacaaagtacttaatgaaaaacataaccaaaatgtagttccagtatccagcaaagataatagtggtaagtaccgaacttattgcaattgttgtgataaaaagattcaaatttattgagagtctgaatctgctaaaattgaatacatattgaaaaatatggatgatttttcaatatggagtaattattattaaagacttcttataaaagtggaattttgataatatcttagaaattaatggtcaaatgaataaagcggaacacattattttaaaaaaatacaataaaaaacattccactgatggaacgtttaacaactatagaaatgtcaaaggttctgcttctgaaaattataattttataaagaaaagatttatgtctcgttatccaagagatgtaaaagataggatgtggaaagaaatctcggcagatgaattctgttctaacaaaaatgattataagaagaatatcatttgattttattcaaattgaaaaaacgaagttatgatccaagggattctaattttatcaataatatgtttttgatgtcaaaaattaaatagatcatcaatatagatcttaagaataaaatgaccaactgtttgattcaaaattttctatcattaagtccagatatccaactcaaaatatttctaatgtacatagtggatactattacatattaagaacaaaaaaagggatagtatgatagcaagatttttcaatgcgaatattatgaatgtgaattccatcatccaaaaactaccctaaaagaaaaggaataacctcagataagattattataatgaagaagacctcagataacaatagtaatatgaatactgtaaattatctgtaatactaaaaattaaacattgaacaacactttaaataattcaaaaaataaaaacataacgaccactattaatagcattaaatctacttctaaaaacaaaaaggaacaaaaagacatcaagacctacaagataataagaacctagtcttaatagatacagaactacctattcatataacaaacaagaaaaattggccgaaaaagttatcatatcattaaaaaggcaccaaaatacggaggaattggttcaaaggaggacataactattgttggattaggatttctaccaattaagaacaatagagataatataaaactagttcaaacatattatgttcctcaggaacaaatcactatcctatcagcatctaaattgtatgatgaaactacaatttccttaccaaaaggatataatactttagaaacatctgagggtgaaagaataaatacattaataaaaaatgattctatttgggtaaaagcagaagaaattattgatatgctaaaagataaagtgtatcatattaggccagaaaatcctgtcgtacacaaatcaactatggaattagaagaagctcatataagattgaatcatattcccaaacgaatcattacagaaagggccaagaaaaatatctacgaggatgtaagtattataaaagatacaaataaagaagaagattggtgtgctacgtttatatctggaaaaatgacttatcattttcataacaagaacgctatgaactattacaataaaaataaattaccaggtgaatcatggtcaattaatgtgtttggtccaataaatggtctacaagtaaatcagcataggtatgtgttgctaatggtaaataaagtattgaaatacataatggtatttactcattgttgtaagaatgctgaagaaattaaagtccaaataatacataatatcaaaattgtcgaaactcaatttaatagaaaagttaacttaattatcaattataaaggcactgcatttccaaatattgaattgaaagaagtcttaaaagatatgggtattcaattaatactaactccaattcaagttggttctaataatgctagagctaaaagaaatatctgttctatcataaatgatataaaaaggatgttacttcagtctagaatacaatttagattctggaaatatgctgttcaggctgcagttgatatcagaaactgttattttaacaggacaattaatgaggctccattacaatcaatttcaaatattaaatcagttatacaacttagatcatttttaccgtttgctgctcctgcctcattatggtaactaatcaaagcaaactaaaaacactcattatacaaggattggctcattgtaaggacaaaagtagttttggttattggttttacatatccaaaacaagaaaaattatatttacaataaattactatatggcattatttacaacaaacaattcatcatatacatcaagaaattatgagactataattgatttatacaataaaggattagaaaagaaaacaggagaaaataaagataccgattttacagttgatgaaggttttaatttaaataatattaaaaaaatgccattagacaaatttctattagacctcacagaagcaaaaacacttgaaaacatagataaatcaatgacaattaattaccatgactctttttttatatatatgatgatgaattctagaaagaaaaaatgaaacatgaagaactcaataagaatgaccatgtagattatgaattacaaaggacgcagccaaggagaatgaaaatactgattttaatggaagaagaacagaaaagtttataaatattggaacgtagtggtatttgtatttaacgttttcatgatttaagttattagtaaattaaatttcaggtttattaagaactaatacaattaagatgaataatttcatatattatgtttatgcatgaatacatattgatcctgcattctttcttattcttttcttgaaagtgtctttttatcatttttaaggatacaataagaagtcagtatttaataaacttaattgagaatactacctatttcttagcagtgtatttattagatgcttagtcaacaattggggaagatgttactgaacgcacaatagaagatgaaactaataaagccaaagattatagtattaaaatagtcgaaattaaaaatagtaataaaaaggttggttagaacattaaagaaacattaattagtgaaaacagattcaagaatagactcaaatgataaagacagtgatgatatgaattttcaaaaggaaaaacacagaaatcaagaaccagacaaagaaatacaatataataacgacagtaagactaacaatataaatgatcatgaagtgcaggttcctgtacataacaaagttagacatagaaaagaaaaacacttaagatccagtccatttttaaacaaaaagaaaagaagcattaagcaagtactcaaaaagaaatgatcaaataatattgatcaacgaagtactgatgagatgaaatataaagataatgacaataattatcaagagaaagaaaatcaccacgaacagaatataggccttaatgaatcagatgataataacaaattgactgatgttccttcattagatgttaaaatagaaggcaagcaactctttaaagatatattagctgcaaaaagacaatataaataagatactgagacaaacgatatcaaaaacatcagtatagataatattatatacagaacaaaagatccaaagaagtttagaattaattttatctatccaaaagaaagttcgacaaagaaaatttatgcaggatattttaaacaagcaataagaacttggaagagaaaaagaagtttttagaagtatatccaaaggagttgaataatctaaaagagatgggtgtttttaacattaaaataaaattagcaaggtgtaatgtgcaaaaagaaaaaattatttgcattaatatcatttttaaatgcaaaagtagcgatatttataaggctcgtatagtttgtgggggatctacaaaatgcaactggttataacgaaattgaaatatcaattcttgacatgcaatttttgaaaattcttttgactgtaatgaacaataaaaaaatgtttttgagaacatttgatataaatcatgctttcttatatgctgctttgaataaagaactttatatcccacttccacaggataatagggttgttacaccattgaagaaatacttgtatggacttagacaaagtctatataactgaaacaatatattgaaacaatttatgaatgctattggtcttcatgactctatttattctcagggttatatatatcggaggatgaattcattatgacagctggttatggtgataattgtataattgcaaccaaaaatgatgataaattggtgaaatatataaaattgttaaaaacaagtttgcgttgaaagaattaggttttatgatacatagtaaactagaagcggatatgttaggtatagatttggattataatagagaaaaaggaatcatacggttgatcattccgagcaatattgaaaaaatttttgaagaatataaagaaattatattcaaaaagaagaaaattaacagtgtacctagccttcgcaagtatgctataaatccaaaaacagataaattgataatggataaatatatattaaaagaaaaagtaaaatggctttaagcattgattggaaaacacaattatattaaaacatgaggaagattagatataaaatttgctttaggcaaactaacacgtctagtattgtttcaacatcctaagataattaaagcagctaaaaaattattgaagtatgtctatgataccataaatagtggaataacattaaaaagagacaataagaataggttagatattacagtgattacagatgcatcattggaatctgagtttgaatcaaaatctcgacttggcgttatcctatgggtaggtaaaaatttttacaatggttttttcaaaaaatctactatagtttgtaagtcatcagtagaatcagaactgaatgttggaggaagatcaagctattttattgaaatgtagaataaagggaatatttaaaaatacaaatccaagcattaacacaataacagattttaaaccagcagttgattggctcaaacaggactattttaaaacaccaacaaaattcataggaattaaatcagaaaaattagaagatgaaatacaagacaaatcaattattatatttaaaagaaaaggaggaaatagtttagcaaatcctttaattaaagagactatgtgggctaacttttcagaattgattaatattttgaaaaattatataaatccagaagatgtactttcgatgactgaataagggaagtagcacgacttttaataaaatggatctctgtcatgaaagtttataacacattctttagggacgtgttagaacatggacataattcttactaggtttctttgttaaagactgttttatgatgtcgttaataatgatgatcaaaagagaaaacacttttgttctcgaaaaaaatttaagaaaataaaaaaaaagaaggatcaatttgtactcatgtataaataatattctatataattatatatgttatttatatagcttattactacatcagagatccaagtggctaatatcttaagtcatgactgtataaaatacaaataccactccttttcaagaaaaacacatacactatactgcacacagtacacacactttccatactgtagtcctaagggagggcagctgcgtgtctgccaacatacaaca

(The sequence listing continues in the following parts.)

1. An isolated fungus belonging to the genus Kazachstania and deposited at the ATCC under the deposit number PTA-127318.

2. A composition comprising the isolated fungus of claim 1, and a pharmaceutically acceptable carrier.

3. A composition comprising a fungus, wherein at least 90% of said fungus is the isolated fungus of claim 1.

4.-10. (canceled)

11. A method for preventing or treating an autoimmune disease in a subject in need thereof, the method comprising administering to said subject a therapeutically effective amount of a pharmaceutical composition comprising the isolated fungus of claim 1, thereby preventing or treating an autoimmune disease in the subject.

12. The method of claim 11, wherein said autoimmune disease is: (i) induced T helper 17 cells (Th17) activity; (ii) characterized by increased Th17 activity; or (iii) both (i) and (ii), and optionally wherein said Th17 activity is induced by a fungal infection.

13. (canceled)

14. The method of claim 11, wherein said subject is afflicted with a fungal infection.

15. The method of claim 11, wherein said autoimmune disease is selected from the group consisting of: multiple sclerosis, psoriasis, and asthma.

16. A method for preventing or treating a fungal infection in a subject in need thereof, the method comprising administering to said subject a therapeutically effective amount of a pharmaceutical composition comprising the isolated fungus of claim 1.

17. The method of claim 11, wherein said fungal infection comprises a Candida infection.

18. The method of claim 11, wherein said fungal infection comprises a Candida albicans infection.

19. The method of claim 16, wherein said treating comprises reducing the number or abundance of a fungus inducing said fungal infection in the gastrointestinal tract of said subject.

20. The method of claim 19, wherein said reducing is: (i) by at least 30% compared to control; (ii) for at least 4 days; or (iii) both (i) and (ii).

21. The method of claim 16, wherein said treating comprises reducing the activity, abundance, or both, of Th 17 cells in said subject.

22. The method of claim 11, wherein said administering comprises colonizing the gut of said subject with said isolated fungus.

23. A non-human animal subject comprising the isolated fungus of claim 1.

24. The non-human animal subject of claim 23, wherein said non-human animal subject is gnotobiotic.

25. The non-human animal subject of claim 23, being a mouse.

26. The non-human animal subject of claim 23, wherein the isolated fungus of claim 1 colonizes or is present in the gastrointestinal tract of said non-human animal subject.

27. A method for producing the non-human animal subject of claim 23, comprising colonizing a gastrointestinal tract of a non-human animal subject with an effective amount of an isolated fungus belonging to the genus Kazachstania and deposited at the ATCC under the deposit number PTA-127318, thereby producing the non-human animal subject.

28. The method of claim 27, further comprising rearing/culturing said non-human animal subject under pathogen free conditions.
